United States Patent Application Publication US 2026/0265753 A1, published September 10, 2026 (application 18/879,707).

The application's sequence listing, which the Patent Office published only in electronic form, follows.

SEQUENCE LISTING (934 sequences)

SEQ ID NO: 1 - DNA, 63718 bp, Homo sapiens
  source 1..63718: mol_type = genomic DNA
gaggcatgaagaaataattgtgcatgactgaggactttccagacctcccctttccttccaccagttacttactaatctcagaatccaccccccaaaatttttctgataaaaacactaccttaaagccagcccagggagacttgagccagcccagggagacctaaagtcaccacagggagatttcagctggactcttctatctccttgttggcctacctgcagtacaaagcttttcttttctcaaaaaccaggtgtcacagtattggtttctagaacattgggcagtgagtgcttttgcgctttggtcggtaacacctggatctgatttagacaatactttggacctgaagtcttaattagttgaacttttgggggattttaagaagacactaatgtattttacctgtgagaagaatctaaataatctgtggccattgggcaaactactgtggaataaaggtgcctgacaattctttgtccctcctcccatcaagaggtggagtcagccaggtgaaatggctcatgctggtaatctcagcactttgggaggccaaagcaggaagactgcgtgagctcaggagttcgagactagcctgagcaatatcgcaacatctcatctctactaaaaattttaaaattagctggacgtggaggcgcatcccggtagtcccagctactcgggaggctgaggcaggagaatcacttgagcccaggagtttgacgttatagtgacctatgatcacaccactgcactacaggctggttgataaaggaagatcctgtctaaaaaaaaaagtaaaaacaagaggccgagccagttttattccccttgaatctggcctgccctataaacttgttttaagcaaaagaatgctttagaagtgatgctaaggctgggctttcagggatctccatcttctgtatttttgaaatgctcctttttggaatgcttcctctagtttgtgaggaaacccaagcagccacatggagagtcctttgtggagagatccaagtggagaatgaaggccccatgacccaacccattctgagtttccagcccccagacagccccaactgccattcacatgagtgaagccattttggaacttccaactgtgccagtgcctcagctgacaccatgtgaggcaaagctgcccagccaactgcaaaactgcgagaaattgttgcttcaaaacagtaagttttggggtaggtgttacgctgcaatagatgactgaaataactgtctaccatgtgccgggcactatttgatgcccttctgatccatgagggtaaaaacagaaatgtaacctggcaggtgcagaagagggcgccataggagggcagaggaaggccagctgcagggagaagcagggagctggtgattctgggcagatgagcacatggatgggccaacggccaagcccccatgccagcttttggccaatcagcactgcaacttcctcctgcatttgtctcgccggatgggattaatttttcacctgacgaagtagagagtggaaaagagctggagacagtggggagaaaggttgcctgggtctgtctcactagcaccagttaatgtctggactgctggacaatgttgtcccaaaggtttctgggccatctgtattatttgtaattgactgcttctaggtgcctgtggatcaggggcagctgagactagtgctcaggcctcagtggactctgcaagttcctgagggataggcaatcagcaagtgttgttccttttcctcgatttctggccacgtgtgtcctgggacaggtctgtgattcttaataacccccgcagtcctgtctcctggctatcatctataccaatggaagacacatccccatttccccctccacttaattttcagttgcaggactaatctgacccaccctcactcattggccaggccgactttacccctagacacaggatgctggggtcagcttcacctttaccaactccttggagaactccactttacgttctaaactaagttagcaataatttttcccttctctccttcccacatcattaagatgatcacagtatttaaaaagtattttaacaaatatcggccgggcacggtggctcacaactgtaatcccagcactttgggaggccgaggcaggcagatcacgaggtcaaaagattgagaccattctggataacacggtgaaaccccatctctactaaaaatacaaacaaattagccgggcatggtggcaggcacctgtagtcccagctacttgggaggctgaggcaggagaatggcgtgaacccaggaggcagagcttgcagtgagccaagatcacgccactgcactccagcctgggtgacagagtgagactccgtctcaaaaaaaaaaaaaaaaaaatctaggggctgaagatacagtagtgaacaagagagaaatttcctgttctcatgaagctgattttctaatgagggaggcaagacaacagaaaataaatgcataatgttgggtagttgatatccactctgaaaaaaatcaagcaggttaaggccgggcgcggtggctcacgcctgtaatcccagcactttgggaggccgaggcgggcggatcacctgaggtcaggagtttgaaaccagcctggccaacatggtgaaatccgtctctactaaaaacacaaaaaattagcccggcgtgatggcaggcacctgtaatcccagctactcaagaggctgaggcaggagaatcgcttgaacccgggaggcagaggttgcagtgaggtgagattgcaccattgcactccaacctgggggacaaaagcaagactttgtctcaaaaaaaaaaaaaaaaaaattcaagcagtttaagcagatttgggcaggaggccattctgcataaggtagtctgaaaaggtctctgtcataaggtgacatttaagagacctgaattgaatgaaatattggggacaagtgtttcaggctaaatgaacagcaagtacaaaggccctgaggcaggaagaaatatggcaagttcaaggaatagctatcaggctagtgtggctaaggcaggtccagcatggtagagtgacagatgtgggtggggagggaaataggaaccagattgaacagggtttctgtggatttggttctgaacaaaatggcatgatctgatttatgcttacaaagatttcctggatgctctgtggaaaacagactagggaggaggaatggaggaggtggaagcagggtgaccaattagtagctgccatataacccagggcaagatgatggtggcttgatcgaggatggttacatcagagttggctggtggtgaattttgatgttttgaaggtagcactgacaaagctggctgagggcttgcaaatggcattgagagcaagagaagcacatcaaggacaccttttagattctggggaactgaataaacaatagtatcactctctgagggaggtaagaacgggagtggtgtgtaaggagtaggttgctgagggcaagatgtattgtgtttgagatgccagtaaaataagcagttgaatctggaggtcagggaagagatctgggctggagacaaatcagtgatcagcatttggatattataaatcattccgaggcagtaagtgtagacacaaaagaacatcatggactatggctggggccttcagcaactggggaagaagtccagagaggagacagaaatggccagtgaagtgaggaagatcagaaggacctggtgtccaggaagtcaagtgaggaaagttgattctgtatgatcacaaccaaagtgtcaactcataagccttattttctcatctgtgaaatggacaccgtaacaccacctacttcatggcagatagtactggcacacagcaaactctcaaaataaggtagctactgttattccctgatggttggctgccagagccctcaacttccctatccacattactgacagcacctccatgagtctttctctggggtgaggtgtctctgctcactcagggcctgaggcctctgggtcaaatcgaggtcaagtggcttcagtgcctaagtctctcacccacacagccttcagcccttacttgcaaatcaacaaagggtaaacctgtagaaaacatgggtttcggagccagaattctgcctcttgccagctgtgggctcttaggaaagtttcttaatctgccggggccccactctacgacatggggagaactgctacttcatgggacagtgggtagcccagtgtagactgtaacgccggctgatctcctgcacgctggcctgggagttagaggcttcttgctgctctcctcttcaaagtatacaggactcccgccacacacacatctggaaccaagctggtctgagagccccttatagcccaggctacctgatggggaggcacagaagtggcaacccgtccactttctttgccgcaggaccccccgttaagcagcggggtccagccgggctgagttagggagggggtttcgaacgtgccactcctcgcccggcgtcgaagcccgtttcctgggtaacctttttctgcctctcttcctagcccaccaaggcccactggccagaacgccgccgcggccccaaaccactccagataaccacccgccagctgtcctctccgttctctccgccgccgcgctgcaggcccaggctcgcacccgagtcccttcgcaccccaggaagtggcgcggcctgtcgagggcagcgtggaggaggaagaggaggcgcggctcaacgcgaccgaagctccgccgcaaaggctcgggaggaagagggcggtgcgcggccaagcgtcggagctgcagtcatactccggggaccccacgacggcgccccgcccgctgcccaccctcccgaggccccgcccagcgcgcccatcccgccacgggctgccccgccttcccgccctcgtccagaaaaccccgcgcccggccccgcccccgccttcgccggggccccgcccctcccctctccgccggcgcctcgggcggcttctcgccgctcccaggtctggctggctggaggagtctcagctctcagccgctcgcccgcccccgctccgggccctcccctagtcgccgctgtggggcagcgcctggcgggcggcccgcgggcgggtcgcctcccctcctgtagcccacacccttcttaaagcggcggcgggaagatgaggcttcgggagccgctcctgagcggcagcgccgcgatgccaggcgcgtccctacagcgggcctgccgcctgctcgtggccgtctgcgctctgcaccttggcgtcaccctcgtttactacctggctggccgcgacctgagccgcctgccccaactggtcggagtctccacaccgctgcagggcggctcgaacagtgccgccgccatcgggcagtcctccggggagctccggaccggaggggcccggccgccgcctcctctaggcgcctcctcccagccgcgcccgggtggcgactccagcccagtcgtggattctggccctggccccgctagcaacttgacctcggtcccagtgccccacaccaccgcactgtcgctgcccgcctgccctgaggagtccccgctgcttggtaaggactcgggtcggcgccagtcggaggattgggacccccccggatttccccgacagggtcccccagacattccctcaggctggctcttctacgacagccagcctccctcttctggatcagagttttaaatcccagacagaggcttgggactggatgggagagaaggtttgcgaggtgggtccctggggagtcctgttggaggcgtggggccgggaccgcacagggaagtcccgaggcccctctagccccagaaccagagaaggccttggagacttccctgctgtggcccgaggctcaggaagttttggagtttgggtctgcttagggcttcgagcagccttgcactgagaactctggtagggacctcgagtaatccactcccttttggggactgacgtgaggctcccggtggggaaggagactgacctctcggttcacgtgtcttgccatagagccactctcctgagtgggtttttctcctgatcgtttgggccaagtgacttctctctgaacctcatatttctcttctgggataataaatggtcaccctttcaaggggttgttttggaagatattgtgaacaatggtaaataagggcttaattaatgagggtaagccctcagtaaattgtcactgtgtgttcatttcttcctctgtgtggatcgtgaccgagagcccttccccctagcctcctcctggtatgggtacccaaaacctaggtgagcagggatctctcccaggggcagagagcttgtgtactctgggtgttagagggctaaaatataaccagtcaacaccacgttgcccatttctggtacttccggtagcagcctgagtctcaattatcttgcccagatgatctgaactctgacctctagcctgtttcagcataggcagagagcttgagtaggtgagtttgcattcctcatagcagctggctgagcctagtctggacttctctttgacctgtaacctacaggcccacaggcccaaggcaaccacaggttgcttccagggttaccacacaggtggtttctcatttctaatgctaggttttagataattgttgtaagtgaggggccctggcaggcaggatgacatcctgccaataggagttttctgtcactttcccacagagccctggctactacatactcttgctcaatttcgccagtaattgcgtcaatgtgttcatatcaagtttgggaagaacatcttggaattggtcagacgtgaactgtggtaataatgggggcttgtttttttaagcagataattaaattcctttgcatttgatgattattctgggaagcagactagtcccataaaatgaaatggactctgccttgctgctaagtgtctgacttgagacatgctatcgagtttctcaaaatctcttccttgtgtaaaatgtggttgtcgatgattaccttacaggggtttttttaagactaaatgagatcgtgtacattaaatacaggcactcaggctgggcatggtggctcacgcctgtaatcctagcactttgggaggctgaggggagtggatcacttgaggttaggagtttgagaccagcctggccaatatggtgaaacaccatcccatctctacaaaaatacaaaaaagttagccaggggtggtggcatcgcagctactcaggaggccgaggcaggagaattgcttgaacctgggaggcagaggttgcagtgagtcaagattgtgccagtacactccagcctgggcgacgaagcaagactgtctaaaaaaaaaaaaaaaaaaaaaaatacgggcactcaatacaccgtataataataatatagtaataatatttgcttaggatctttaaaaagtttcattttttcagactcccacagaaatggctctgcacagcagagtgaagggggagagagactgagtctccaggccagaaaaaggccaggttttttgcttttgtttttagttgttgcctggatattgcacagaaagaaaaaataattagcaagttaaacaaaagtaccgcaaagttgattacattggtatttgagtatcacatcttctctcagaagcgtaagagacaaggtcgtgaccatacctctgcttagttttgttttgtaatggtgttgctagtgatcggcttgtcaccagttactggtgtttctaaatggactataattggctacttgaaaggacttcctgagaaagaacattttggaggacgaggagagagtgccttctctattttggctgctttcatgtgacatgcaagagaccatgacgtttaggctgctgctgaggcagccccagaaatgggggccgagaggtcttttcttcattttaatagggtctgtaggtttgggtggttaggtacagttctcagaatggaggttcctggctatgaggccttgagaaagctgaaagtctccttgggagtgtgtgggtggggggagtcgagcccatctgttcatgggcaggtgtcagccaaagcccttgcgggtggttttgaggttggtgggagaaagcatccgtggggtttagagttgtggccttttcactacttgcagttcctttccccgacttggctttactttctggtgtccaggggtctgggccagatgctgagattcctctcagctgacaggtgtgggttatgggcaaacccttccctggaggacataaggcaccggattggactgctgatgggttgctgttggagttgtcagggccttggaatagtcttcagatagacttgggttagtgtgacctggggcaggctgcaggtttggagccatagtaccccccgcccccacaccgggcaccctgctctgggctaatgtgaggcttgcaggagtgagtgatgcagtgggaaggggggcctttcctgaggattctacagctttctccagggaatcctcccaggtagtttaggcctgcaggtgctatgctatccttctttcctaaccctgtctcaggtcctcagcggggccatgcggcatccacttataaccctgcagcgaggccctcttttctggccacctgggtgtttgcctgctgagatgggaggaacagtggccttgggcttcttcccccgtcatgtttatctctgctcagattgggcagcagctcaatgggacttgaccagctgtggcactgccagtctgaagatgagtagggtgatggggggaggtgggcagtacctgaagctgaactggtgagagaggcaggctggcctgggggctcagctggggcctgggatggttggtacagtcccctcaggggggtaggggagtgagtgttagactgcttaagcctcagaggccgctcttgcccacctatgctttgaggagatcctcttcatttgttcaaagggaagactctgatctagagatgggcacttggaccagcaaacagcagctacaggtagccagggcacccgaggagcacttgctcatgagccggtttccctggtttttatgggggctgttgctgagcgtctgccagggtttgtgtcctagcacttgctggtctttgctgggctctcagctctcaggtgtttctctaccagcacgtttccccctccctcatatgcacacatgtggacacaagcaggctgcccaggacagagtgtactttgaggcttgggaaaggactctctctcgcccttttggggatgagccttggaacctcatcaccttccggcttggggtggagcttcatcctgggggttgaagctttaggctcagataactagtcttgtaagccagttttgtcctgttgtttttttcgtggaaaataatgtattgacgtatacacagacattctttgtctaacagtctgagattgagaaataccctccatgactatttggtttgctttcatggtgaaacttggtcgctttcttagacacagcctatggcaataagagtgatccctggctgctgtaattcattccagactttgagcaaacacaaggcaccgcctccacctgcagtggagcctctgatgaaccaaatggaaactccttggggaatggggagtaagagccaaatgtgggattggacttaaactgcagcttcttagaactgtagcattccacgatgggattgtctagtgctcttcctggaggttactattcaatagttggctagtgcacaggttcaggggtgacctgatatgccctagcgtttcagaagatccctgcaaggtgtgtcttttggtccatctgaagggtcttgtatggtgatcttgtatggatatccgtgacggctaaggcatctgataacttcattccttcagttccagcagtgttcctgtattatgctgggcactagagctacaaagaagaaaacaaagtgcctcctcttcaggaactcttaatttaggcaggggaggcataattgaacagtgctgaggtcatctaggggaaccaaagtgtgtatttatccccttccctatcactcccctccctccttcatttcttcctttcttctttcagaaactccaagttcatatcaaaattctccagccctggttttatttggttgtgtgaaaattttcctctaatttctgaagctatgcattagttctgctgagtaatctttaacttgctgctttataatgattataatgagatatcactgggtattatggtctttgggtagcagcagggtagggatttccaggctgggactaagctaatttatgggttgggaattatggggcagttaatagcaaggcagtccaagctttccacagattccaccctagggaccatccagacttaaggaacagggccggcaggctcatcccctttgcactcagctgggctatgggtgtgtgtttgtgaaagaggtttattcagtagtcatacctgctgatttccctgctatctgtttacccagtgcctcctgtaccttgtttcttactctttgttctctgctcttactatgaagaagcagagactggaattctgcttgaacccacatctacctggaaattccagtttttcttgtccagtggagcagcaatccagttgttttaggacaaatggtctgcccttgaagcttaaatcctttgagggcctggcatggtgacagttttacatttggctttggtatagactggtgtggtccctgggcagtgaggtcactgtaaggccagccagccagaccctggctcctaggggaattaacaaggcatgggattagactcacagggtccctcctgtccctaaacttggtaggggttcctgggagccagactgcgattaagattgtagagacctgagacctgagttgtaggggcctctgtgttgatctgggccattgccgggtgagctgaggcggtcactagctcaaggagtgatctcaggatattgttctgtaagtcagagacctccaggttggagagtggggcttgggggtgggggacagggtttagtggggagctggttctgggtgaatgtggcctaaagggatttgtccttagaagacagaggggtgagtcacacactcagtgcttcaggttccactttgcggcttggcctcagcccgccccttccctgcacaaatgaaggccaggggctatataattggctgttgctgaattctttggcagtgattttaaagtctggtctgggtgtgttatgtagctgcttctctatccactccccacacccgctgcttctccagagcccctcacaaagcccaggcagagagagagagagagagagagagaatgacttgcctcacagagatgttggggatagggataggggtatgggtctttgcttttgccttttgaggggggataatctcttccttcattttaaaagtaaaaagtaatgcaggctcattgaaaataatttgaaaagttgaaagagatataaaagcacacccaaattcctatcacccaaaagaaacataccggcatatttcctactagtctttttcatgtttaagaatatagctgatatatttttttttctttttctttttgagacagggtttttgctctgtcacccaggctggagtgcagtgatcacggctcactgcagcctcgacctctcgggctaagcgattctcccacttcagtctcccgagttgctgggaccacaggtgcacaccgccatgcctgactaatttttgtattttttgtagagatggggttttgccatgttgcctaggctggtctcgaactccagagctcaagtgattcacctgccttggcctcccaaagcgctgggattataggtgtcagtcaccacacccagtgttatagctgttgtctttatagatgaacagatagattgacatagattcatgtagatagcctggtgttcagcatttttcatttaagattctgtcacagacttgaccctatacctttaaaaatcacaaaggcagtatcatagtctgtcagctgaatatgccataacttaaaaaaatcattcaactgttgctgaacacacacatatacatatatagtttttgttttttcttagtgatgtagtgatgcttgtgcagaaagctttatgtactttttggatggtttctgtaggagagctttctaaaaaaggaaaaaaagtgttgaatgttttttgagaagggctagattttcaagccagtcttacaaaaggatagactcattggaaattccagatttgcttagtgctggcagatgagtatcacttattgctgaacaatgtgtctagaattctgattaaaaaagaaactaggtccaggaagtgcctgggggcaggggcaaagggccaggctgcaggataggctcttaggatctggctgagcagaaatctgctgtgaacagaatcggtgggggtgatgctttctcagtaacttctccatttgtttctttagcagctaagtccctgtgctggacttctgtggactactgtggctctggggctgtggttgtgggtgaacaacagctagctaaaccagtgctgttgacatcattgagatgtgacgcacaggaaggtgggagcaagcttgcaaatcagattctgaaacatatagcacagctctcccacctccaggtggtcctgagatctagggaggagccatagtgagaaactttaggtttctaggaattctcttagggagaagctctcttagggagaggcagaacctggttctcagttggggctgattcaggtgggttagatcaataaagcctcaggccagtgtgccaggctattcccaaggagtatactttgaagttactccctttagaatgtcctcagtggagataaattctctctgaggagcagttttgtctgccggggtcatttggcacaaagcctggagtgctagggcgaggttgcactgagggaaggggcaggattatgtcagcagtgtgacggatacagtgtgaggtcaggctccttcctgccccaccacgggggcctagaggtcatggggagggtccctggcaggggattcaatcattgcttggccccatgacagagtatattctaaaaatgccttaagtttttttctttcaaagtttcttcctgttttgcataatggccttttgcctttgacatcctgaaaccgcagagctgtcattggtgttgcaggacactgccagcttgaaaaaaatcaacaacaaaaaaagaaacaggaaaggatgtggagttcagggtgcggcctagggaagctggtatttgcgttatgggattgtggggatgtggtattaaggtgttgggtagcgcctgacatttagaggagtactctgggcagagtccctgcctgcccaagaataggtagaattgagtcttcacaccaaagtcaggagagaccccctccccccaggaagagaatgaacagggactcatttcctcattcagcaaacttttattggtaactacactatatgaagtgtgagagatagacatgaacaagagaggcccccactcttgggcagtcccttagtagtagtagatagactctggcaatatggtgtggtcagagagaggaagcctgggtgctttgagggtactgaggaggtgcagggagccaaatgggtggtctgggccagggccagagtcagaatgaaggacctctcttccagacgttgattttagcatctctgtctctcagtatgtttgaacagtctcccttattggaagggcaggagtctactgctaaaagtaacctgcgatttcctctacttgctgtcatgtggaaagaatactaaagctgaaattccaaaagttgcacacctttaccagcagggcaggagaggaaaggaaatggaggcagagtgagctgaagatgataaaagaaagagaaggtggtgcagtttggactgttatggacagaggaagtctgagggtagctggactgagggatcaaagggaggcagttgaaagggaagagagctgcagagagggatttcttggtctgcagagggtaggagcaagccttgaaggctgctggagtgaggattccgagccctggtctttattctttttctaattcattacatcattttaggcaagtcctaactcctttggtctctgttgtctttctgaaatttgagtgggctgggcctgctggtctttagcctctgtctttctctacctcctagattccagtttggcgagtgggggggaaaacctggttgtatatgcaacgtgaaaggcctctggaattccttttgaagctcactacccatgaggcttctgctaaggatttcatcatgtctgtctaagcagacataaaaattttagcaggtggatgacccgtagaaatggcacaaggaatgtttctttctgtcacactgtggtatttgatttaagaaagttgttatcctctctgtgcctcagtgttctcacttgtaaaatggcaataacagtatccacctcatagatgttatgaaatacaggtagtagccacgaaagggcttaaaacagtgcctaacacagaataagttgtgaatatatgttatttattattggtagtataatgcttatttgtgaagattttggcttttgctttataggaccttttttttttttagttgaaaatacaatgttaccatgttaaatgttaaaaaaaattctacttaccattgtaacagaacatgctcccacttctgtaacagagcttgctattacttttcaaatgcatacatattccaatgcatatattccaatgcagttgtagagtgaaactgtttgcatgcagccatttttatccaacattatcttataaaatgttatgttgtttatgattatcctaattatcttttgttgctgtctagtatccttatagatattccattagcatacactattccaggtttcactatcgtcgataatctagatatgaacatttttgtagtgtgtagctctttgcttcagttgaattactttcctgggataaattcctggggaagaatttctaggccagaggatatggtcatcttgacaatactgattcacattgctgcattgctttccaagaggtttggaatcattcacaggttctaaattggaaaatcctggcttttgaagtatgtggattctaagggcgatttggatctagctggagcctcacactgacacttccagccagtgtgtgtgtgtgtgtgtgtgtgtgtgtgtgtgtgtgtagttccctatgctggacaccgtgtgtgtgtgtgtgtgtgtgtgtgtgtgtgtgtgtgtagttccctatgctggacaccatgtggcctttctggacattagggttttcctgtgattgcctcagagcagttcctgttgaattcactctgtgtccacaaaaggagccttactgtggctctttcaacacccacctacctttgccaagttggtttacagaaagtaagaacattctttccttcttccttgatatgtggcgctaaacctatagcatggggcaggctctggctttaaaaacctgacttaaaaataatggtgttgatcaaaaagtttgtggatcagtttttggaaacactgcatgtagccatccatagaaacttatattctgttgggctagcctgggcgcctgatcatttaactcatgtggatgaacttctatgtaatagccctggtgtatgggatccagaaacagggccctaatgaagaaaggcttttaaattatgttggataaaaataagttgttacaatagcccaaagtctgcaaatatgaattgccagttctgtccttgtagtcatccaccatgtgcctgcatcttttgtagactcttgtagattcagaagcccactgaattgcataaatgatggaatgattttagacttagtgatttcagtgactaaaagtttacagatcctggccgggcacagtggctcacacccgtattcccagcactttgggaggccgaggtgggtggatcacctgaggtcaggagtttgagaccagcctggccaacatggtgaaaccttgtctctactaaaaatacaaaaattagccgggtgtggtggcatgcacctgttgtcccagctacttgggaggctgaggtgggagaatggcttgaacctgggaggcggaggttgcagtgagcccacatcaggccactgcactccagcctgggtgacagagtgagactctgtctccacctcccccgccccccgaaaaaaaaaaaagtttacagatccagcagatggggcatattcaatttgtgacagccactcccttcaccttatagctatgtcatatgtcttcttctcctttgactgcattctgcagcagtcagttgtgacttaatatggcactctgggcccactgaattaggtcagagctgctagtagtatattgttcctagagacctagggcaagattttcttactacataaaatgagggagataatttcttacctcaagatgttggtaagaggagtgaatgaggttagttatatggtaatatcagtactctgaatgtcttttgatcaatgcctaactcatcttcttgggcacaaaaggcatacagtcagcacccttaggccacatataaaattcctccaaatgcaggttttcatctgccttggggcagagtcaagagaaagaagaggaagaggcgtgaggctctgaccacaacttagggacagaatatagcccaaagcgagtaccccaggccacaaggagaaggccgctatcttgttgaatccacagcactggaaacttggagtgtgtgttcccctgtgtcagttacactggaattttatggctgctcacattcttcccttcaggtggacgttgttcatcagtatcctgggcaagaggccatcataaaccacagacagctgagtgattaggaagaggagctgaagagggagcattagatgtttgattgagtcttaggtgagaaagtatatcattaaaacaaaaagatagatgtaggcgggctcagtcttgtgtgcctggtgtgttggtagaaaaactaaagcacaagcctgtagataacctgctttattctacctcggggctggtgttggaatccaggatgccagaccctaaagtccagctctctttccaacctactgaataatccgagagaaatcatgttctctctctgggcctcagtttgcccatgtataaaatgagatgaaggattggctgggatgctctccagagtctcttcctgcctggagttctgacgtagccatgtactcctgctcagcatcgctaaatggctttgtggtaggaccattgagtgctgcctccattagggccagctatgtaatgctggggtggctgtcactgggccctaagagccaggattggtcttactggagaaatccacatccacctaaacttaagacccaggggtgtccaatcttttggcttccccaggccacactggaagaagaattgtcttggaccgcatataaaatacactaattatagccgatgaggttaaaaaaaaaaaactcaatattttaagagagttcatgaatttgtgttgagctgcattcaaagccatcctggccgcatgtggcccatgggccatcggttggacatgcttgctttagacctcccagcaattctagtctctaaacaggaaatcaaaagtcaagatgaatagataagttggtcagtgtgaaaaagtaattggtgggagccactgtagatgcagggttctaggctccatcaacaaccacctacatcactgaacgaaagataatgcttgttcagcacttattacatgccaaccatggtaaaaatacttcagatgcattgttttcatgaactctcacagcagctctttttcttgcctaaatgccccgttagaacctccagtacaatgttaaatagatatgctaagagacaacatatgtgtcttgttagggggaaaatatccagtctttgactattaagaatggtgttagcagtgggtttttcctaggtgccctttatcaggttgaggaagttcctttctattcctggtttgttgagtatttttatcatgaaaaggtgatgggttttgtcaaatgcttttctgtgtctgttgagatgatcatgtttttttgtcatttattctattgatatggtatattatacattgatttttcagatattaatcttgcatacctgggataaatcccacttggtcatggtgtataattctttttatttgttgctggattgagtttgctagtattttgttgatttgtattcataacagatagtggtctgtagtctttccctccctccctccctccctccctccctcccttccttccttcctctctctctctctctctcccctcccctcccttcttttcccctcctctcccctccccttccctttcttctctttcatagttgtttaccactgtcagaaaaggtctgttcgttttctttcgtcgtgagatctttgtttggttttggtatcagggtaatactgcctcaaaaaatgagtagggaagtgttccttcctcttctgtattttgagagagtttgtggtcggtttttattaattcttctttaaatatctggtagcgttcaccagtaaagccatctgggcctgatgttttctttgtggaaaactttttgattcctaattcagtttctggttataggtctattcagaccttctattttttcttaagtcagttttgatagtttgtgtcttccaaggagtttgcttcatctaagtcatctaatttgttggcatacatttcatagtgattccttatgatcctttttatttccgttaaagttggtgtagggatagtccctctttcattactgattataataatttgaattttctttttttcttagtcttgccaaaagcttgtcatttttattgatcttttcagaggaccaactttgagttcattatttgttctctttgttcttatttttctgcttcattaacttctctaatctttattctttcattctgcttgcttttggttaagtttgctttttctggtgtcttaaggtagaaggttaggttactgatttgagatttaaagatcatgctctttaaacgttttgatagatactgtcagtttgccctctggctttttctcattaacagtgtataggagtgcttattcctcacactcataccagccctgggtgttactaacctttatatatttgccagtatcatattcagacatagtatcttgttttaatatgtttctctgattactgatgaagttaagcaaattttcacgtgtttattggccatctgtctttcttttttcatcctttctttcaagatgggagtctttgccatgttgcccaggctggactcgaactcctgggctcaaatgatcttcctgcctcagcctcctgagtagctgggactataggcgtgagccaccatggctggcttgcccatttgtatttcttatgtgagtattttttctttttttttgaagtggagtctcactccatcccccagagtggagtgcagttgtccgatcttggctcactgcaaccaccgcctcccaggttcaagtgattctcacaccttagcctcccaagtatctgggactataggtgtgtgccaccacacctggctaatatttgtatttttagcagagatggggtttcaccatgttggccaggctggtttcaaactggcctcaagtgattcacctgcctcggcctcccaaagtgctgggattacaggtgtgagccactgtgcccagctgactttttttttcttttttttaacccttttttttttttaccctttttttggcccatttttttttaccctttttcttttaacccatttttctattagttttaaaaatatgtttgcaggagctttttatattgtggatttttcttgtttattacatatcatttgtaaatatggtctctccatctgtcactcttctttatctctggtttctttagctatgtagaagttgttatgttatgttatgttatgttatgttatgttatgttatgttatgttatgttatgttattttttggagagggagtcttgctctgtcgcccaggctggagtgcagtggtgaaatctcggctcactgcaacctctgcctcctgggttcaagcgattctcctgcctcagcttcccgagaagctgtgattacaggcacccgccaccacacccagctaatttttgtgttttagtagagacggggtttcactatgtaggtcaagctgatctcaaactcctgatctcaaatgatcctcccaaagtgctggggttacaggcgtgagccactgcactcggccagaagttttgaatttttatgtgtttaaatctatgttttcctttatgacttcaggttgctttcatacttaagcaggtcttcaccatcccaaaatgataaaatttttctcctgagttttcttctaagttggttctttagaagccaccaacttggcttcgacagcaaaagatgaacagaatttctgttcaactctcatgctgcaagaagctttatgtaatactccagggaccctttaaggtcccagagttttcctccaaatctatcagtgattctagtggctaagagtagaaatgtgaaaatttagccatgtgtgctgatagagctgtagtaatttgtaagctctgaagttctaaggagtcaggggagaagggaaagtaacatttattgaacatctattagctcaataagaacatgcgataagtatgtatatgtattatttcacttacatctgaaaggaaggcataattatccccactccttagagaaggaaattggagctggctacatttaaagtagtcctgacaccagagagatattgccaggagtacttggctggctgagtgcccagatggcccataggagtagtgggccctccacagtccaaggtctggttctaggtggagagagaaggatgtgctcgtagtcagcaccgcagctccagaaaatctgctggggctccaaaactgattagaggggcagctgactcagtaataaaactcccaggagacttacttacatactggaatgcaaagttgcagctttactgggaagattagaactgttattgagtagcttagaaatctctggctgaattcactgcaagggaagccgcaggataagctaactgctggtgagtcagcagtcagagcagggaagtgaatttaacattagatgggtcagtctctcgtggctgatgaattcatccccacaatactgtacacctgccttagggacctttgtctggactaggggttggggtccccctcctttgtacagccctggaaggacacatccagctccatccgccatctctcccttacttatttccttccttccttccttctttccatccagccatcaagcttcctttcatggccaataatcatcattggggtctactcatggactctcttgcctcatgtatttgttttattttgtcctcattcccacttctatttcccaggtatatcacaggcaactattctaacgtatttatagtttgtgtatctgtttttgctcttgccaaaatggaagccactgctttatacatagatgtattcttaactttaaaaaaaatttttttagattaacctacaataaaattggctttttggcatatagtctataaattttaacacatacatatttttgtgtatctaccaccacaatcaggatacagaacagttccatcaccccaaaaaaatccctcttgtagtcacattctcctcccacccttaatcccaggcaaccactgatctattcttcattactattgttttgtctttttgaggatgtcacataaatggagtcacacagtatatatacatttttttaaacatatgtaaatggcattttatagctcattttgattatatgtttttcatccagttctgttttttttttttatttttaaaaagtttgacataacttcagacttacagaaaagttgttagactaatacaaagaattcctggatatcctttggagtccctaaatgttaacattttactatatttactttttccttctctctctctctctctctcgctctgtgtgtgtgtgtgtgtgtgtgtgtgtgtgtgtatctacctgtagatagatagatattaatataattttagatagatgtatctagatctctctctctcatatatatgtgtgtgtgtatatatctatatctatatctatatatatctccttttacccttaaatattcagtgtatatttcctaacaacaaggtgatttaaaaatatatatataaacatagtataattaacaatcaggacatcaacattgaaacatttctgctatgtcatctacaggccttaggaagactttgtcaggtgccccaataatagccttgatggtagaagaaaaccatgtgttgtattcagttgtcatgtctcttagtgtcttgtaatctgaaataattcccaagccctttggatttcatgacagtgacattgttgaagagtacaggccagttattttgtagaaggtctctcagtttaggtctgtctgatgtttcctcctgatcagattcaggttattcacttttgacaggaataccactgaaatgatgctgagttcttctcagtgtaacgagatctagagacacacactgtcagtttgttccttattggcagtgtgaaccttgaggatttcattgtagtggcatttggcattactccattatagttactattttaccattttaaattaaaactatctggccgggcgtagtagctcatgtctgtaatcccagcactttaggaggctgaggcgggcaaattgcttgaggtcagaagtttgaaaccatcctagccaacataacatggtgaaacgccatctctataaaaaatacaaaaaattagcctggcgtggtggcgcatttgtagttccagctactcaggaggctgaggcacaaggcttgcttgagcctgggaggcggaggttgcagtgagctgaaatcacgccactgcactctagccagggtgacagagtgagactctgtctcaaaaaaaaaaagtaaataaataaaaaaattttttaagtatcttatgggcatatacttgtcctgttactcctcaaactttcatccacttttttttttttaaattttttttcttacctttcatcgttttcttgatatccactgggttttagcatctacaaatgattcttgcctgaatcagttattatggtagttgatggttttctaattccattattccttctatgtttgttaattttggcattcttctataaggaagagcttaccctttttccctattaattaattcatatattaatgcagacctatgcattcttacttcattaaatcataatcctttactatcattatgtattctgatgttcagactatcccagatttagccaataagatccccttcaggggaatggtctttgggattcctctttagaggttcctggttcctgttttcttttgacatatcctattactctttgagcatttttttttttttttttacttttaggcacagcaagaagttccatggtcctcttgttctttccccaactcagccctagagtcagtcacttctccaatgagctctagttccttttagtagagaatcataattagaaaacaagaatcagtgccaagtgtgcacctttgtttttaaggtccatccacgttgccgtgtatatgtccagcatgttgattctaactgctgaataatacctcatgattgtcatccatcccagtgtttctttttcccttctgtaatgagggactcctggactgcctccagcattaccttcacaaatattgctgtgaggaaaatccttaaacgtttcctttatgggcaacgtgtgagcatgtttatgttgattcaggggtgccagacacagctccagaatggctgcctcagtttacatttccaccagcagagcatgacaggctctgtgtctccgtgaataatcagcattaaccagcttcctattttttgccaaactaatagatgtgctaggataactctttgttttaacttgtttttctctgattaccaatgagctggagcatttcttcatatgcctgatggtctttgggattcctcttaggtaaattgcttattcattataatcctttgcctgtttttcactggagttcttatatttttcttgaagatatgcaggaattccttatacatcctagatattaatcccttcctggtctcagacattgcagatatcttctgaatctgttatttacttatttatttacaattttttttttaagagttggggttttgctctgtcacccagactggagtgcagtggtatgatcatgactcattgtggcctcgcaatcctgggcttaagcgatcctcccacctcagcctcctgagtagttgggactacaggtatgcaccaccagacttggctaattttattttattttttagagatggaagtcttaatatgttgctcaggccaatcttgaactcctggcctcaagcaatctttccacctcagcctcctgcatctattatatatatgttcactttgctcatgctgtattttgttgcaacataaaactatttttcccattgttttgtgcagtctctcaccagcactcttctttttctgtaactgtgttaatgccctttgttcttccatatgttaggtatgctggtatagttgaactctgctgactctcctcagtaaacagtctctttttatgacaccttatcctctactgaattctctctatcaagaatgacttggccgggcatgggggctcatgcctgtaatcccagcattctgggaggccgaggtgggcagatcacccgaggtcagaagttcaagaccagcccggccaacacggtgaaaccctgtctctatgaaaatacaaaaatcagctgggcgtggtggcaggtgcctgtaatcccagctacttgggaggctgaggcgggagaatcacttgaacctgagggggaggttgcagtaagccgggatggcacattgcactccagactgggtgatggagaaactccatctcagggggaaaaaaaaaaaaaaaaaaagaatgacttgtcttcctcttagagtgtgaggtctacatacaaatattattcttgtattcagcaaatgtatgtcataggcctagtgtgtgttaggaactgtgctgtcaccaacaaagtttagagaggttataaaacttgactgtagctttttagaggtggaggagtgatttgaaacctaggctgtaattccttcctcctgtgattccttcctactgtgttgccttcccttgaaaattgcatttgggggccaggtgtggtggctctcgcctgtaatcccagcactttgggaggctgaggcgggtggatcacctgaggtcaggagttcaagaccagcctggccaacatggcgaaaccccgtctttactaaaaatacaaaaattagctggatgtggtgtgtggtgacatgcacctatattcccaggtactcagtaggctgaggcaagagaatcacttgaacccaggaggcagaggctgcagtgagctgaaattgcaccactgcactccagcctgagtgacagagtgagactctgtctcaaaaaaaaaaaaaagaaaagaaagaaaattgcatttagttcctgtagactgtgtgtcaaatgtctaaatctcttctaacaaatggcctaaggaggtgcaaagcgaagcatcctcaccagcatcctgacttggcagtgaggcatgggaccctggagggagtagtggtaagtgtgactctggaattcttcctgggctacttgtcagtgactggctccagattgagaggagagcccagaggacacaggtggctgccccagcctggaggtgaaagtcttaaaataaaatgccagatgcctagaccattctaaacctttctgagaagctgaaatcatcccttctggaagcgctctagttctaaaaggacagatatacagcaagatcttcctggggctaatatggagtttataggcaagtaggcctcagaacctttccctggtagtgatatctgtgggcaggcacagtttccacactttccagaaattccagcggaaggagtgagaaggaggaatctgcccttgagtgaggaccaaagaaagcagaaattcctcttgggaatttttcctccagagaccaaacactacttgggagcttgtttactgggctttaaaagcttgtgacccccagtcactctttcttgaccccaaggctttgcatttctgtggcttccccactggacagaagtggaactgtcatgctgcctgttctggggtctcccagaggtttccccatgtcctctccttgcttctactgccccacagaattggggatctgtgaccacatatggtatagaattaatgcttgagaatggtttagttcagtgatgtcaaataagattcacttttatgccacctccatcagttgaaggcccccctggcccctaaattggaaaagattctgagacagaatccccgtgggtacagcgcagggacagtaaaggcacgtgtgctgtgatttgctatccactgtgtggatgcatccaggaatatcagaaccctggaagattatttaaggggaagttaggacagcttttttgccaatccaagggtgttcttgaggaagtctgtcttcctgtatggccttcagtttctttcctgtgtaaccatggggccaacacataattcccacagctctattggcccttgtctgccaggattctctagggtctgattcgaggtggatcctggccctttgaggtggcagaatctgatcatggtgctgtttccttagatttaggccttgatacccttggcgagagcatcctgggctgagtgaccacctgaggtttttctggtgattttgtgacccatgtaaaactttgagctttgggattattctctcaaggaaatagtgacatttggtgaagagcctgtttggtgtggctatgtgaggcttagccaagaaaatgcaccatttttattaggaggttaggccatccgttgccacaaagtgtcagatgctaggcctagagcctggagaaaacttattttaaaattgatggggtgctggaggggttggggggtggtggctgtagctcatgaatcaggtgctaaacctagaaacaaaaggcctcatgtggcagactgtttctgagcacagatgaatggatgagcaactggcgcaactttgcccagttggtccagcttcccacttggccacctaggcttgctgtgaagacctcgtctggcagaaatgagagtgtttttgccccatcttgatcttaactgtaatttaagactaaaatcttagattctaaaacatcaaaggcaagatggctcccagctctgtgagctcagcttctcacctcttagttgaacaagtgcagtgtgggtcaatacatgattgctgctcttgctgccaggaactgtcccagcatagaaaggaatgggacacaatccctgccgtcaagattctaagggaggaagcaggcaggtcgactggtgcctcatctctgcagggctccagccaaggtttgtgaaggattttgcaggcatatggagtggggactgattgatcccgagaggggactggggaaagctctgaagaggggatgacatttggtttgaactccaaaaaatggttgctttacctgtttcctgaagtttttgaggtggcttataagaacatataccataaaaaggaccaatataaatttaaaatcagaaaaagagaaaatgggctgggcatggtggctcatgcctgtaatcccagcactttgggaggccaaggtgggtggatcgtgaggtcaggagatcgagaccatcctgcctggccaacatggtgaaaccccggctctactaaaaatacaaaaaattagctgggtgtggtggcacatgcctgtagtcccacctacttgggaggctgaggcaggagaatcgcttgaaacctgggaggcggaggttgcagtgagctgagatcgcaccactgcactccagcctgggcgacagagtgagactcctcctcaaaaataaataaataaagagaaaatggaacttagaaaattaagaggaagagtgaaaaggtagatatttagtcaggcacagtggctcatgcctgtaatcccaacactttgggaggccaagacaggaaaatctcttgagaccaggagcttgagacttgcctggcaacatctcaggtgagaccttatctctacaaaaaatttaaaaattagctgagctgtgtggctcgtgactgtgatcccagctactcaggaggccgagaccacagcccaggaggatcgcttgggcccagcagtttgaggctgcagtgagctggcaccactgcaattcagcctgggctacagagcaagacccagtttaaaaaaaaaaaaaaagatattcaaaccatgggtcccaacgtagttattatatttgaccatttgcaaaagctgaaagcaaaacatgttacacattttcagagaggaaaatacacagtagttcctgagtgtaagttgtttttcttgacctcattcttaaattgcttcatgagggtgggagggaagtggtagttaataagtgaacctgtaaaccagcgtttctcaaaatgtagtccagggaattgcatcaaaattgcagttacctacagtgcttgttaaaatgcagattcctgggcccctgccccaggcttatcaaatcaatctggtgagtaggactcaagaacctgtaaattcacatacttctgcagatgattcttcttgcactgcacagcatgaaagcctctgcaatagacagaaagctaccagcattgcgaaagcaacttgagtgcttggcctttgaaggttgagtgggactttaatgagggagagagtaaggcatgagaaatggcagttccactgaggtcagtcagtggttcattgctgacgaagtcacttttaagtcatgttttagaagaactaccaagtgtggcaggtcaggcatgtggcaggactgtttctgagcacagatgaatggatgagcacctggccccactgtgcccagttggtctagcttcccacttggccacctacggtctgctgtgtggaccttgtctggcagtctcctttaatttattttttattatttttttctttttgagatggagtcttgctttgttgcccaggctagagtgcagtggcatgatctcggctcactgcagcctccacttcccaggttccagcgattctcctgcctcagcctcccaggtagctgggatcacaggcaagtgccaccacgcccagctaatttttgtatttttaatagagacatggttttaccatgttggccaggctggtctcgaactcctgacctcaggtgatccacccatctcagcctcccaaaatgctggaattacaggtgtgagccaccgcacctggcctattttttttcagcaaattctttgtttttctctctgttcccaaatgcagggtactgagaccacagatgtattctgtttcctgttgaaaaaatgtttctcacttagctgggtgtggtagcatgcactgcagtcccacgggaggctgaggcgagaggattgcttgagcccaggagttcgataatcatgccattgcactctggtctgggtaacagagcgagaaactgtctcttaaaaaaaagaaaaagaaaaagaggtcctagggaaagaaacaaatagtggcttggatggtgagttggtggaaagaacagtgggtgttgggggtgttgaacttgtgtttgtgtgtggtgtacccaagacatatcatgtcagcattaagaatagactattcctgttttctggtcactgagttgtatgttttgacatccttattttggaagatacttccttactaggaatgggatagggagggggtcacctttcccatctgtgggtcatattttaaaatatttattgttcaagtttaaagatataaccaaaggtataaagaaaaataccacaaacatctgatttaagaaacaaaccagccgagcgcggtggctcgtgcctgtaatcccagcactgtgggaggccgaggcaggcagatcatgaggtcaagagatcgagaccatcctggccaacatggtgaaaccccgtctctactgaaaatacaaaaattaactggtcatggtggtgtgtgcctgtagtcccagctactcgggaggctgtggcaggagaatcgcttgaacccaggaggcggaggttgtagtgagccaagattgtgccactgcattctagcctggcgacagagtgagactccgtctcaaaaagaaaaaaaaaagaaagaaatcatttcctacaccttcgaagccttcatgagttagattttgaaacagtgcaaaatgcttcacgtgagaatcgagagtcccttctggtggctctccatcccctgctcttctgtcaggttttcttgtaggtttatggaaacctttgttacttgtgcaggtggcagagaagcagagaggatagctgcgcgccacccacacagctaggatttattggcgtactcccacgtgcatggcagccaagtggacacaactctgtgatgaatcctcccaagagaactgaggggccctgatggaggagctgcttctttgcaaagctttccttgactctcttcctgtcccctagttgattccccttctgtgctagttttagcttattgtttgttacctgtcacacttagcagtactgttggctttgctggtctccttgactactgggggtaaagaccttttgttgttgttgttgagacagagtcttgctctgtcgcccaggctggagtgcaatggcgtgatttcggctcactgcaaccttcacctcccaggttcaagagattctcctgcctcagcctcctaagtagctgggattacagctacaccacacccggttaatttttgtatttttaatagagatggggtttagtagagatggggtttcaccatgttggccaggctggtctcaagcccctgacctcaaggtgacctgcctgtctcagcctcccaaagtgctgggattacagacatgagccaccatgcccagcctcaaagacctcttctttacttgctcaccctgccgcccactcccctaccaacccctgcatgccctataccacctggcacatgatacatactaactgggtacatgtttgaatatgaatggatgtggtgctgtgaatgcttaggggaagtgggtgaaatgcttaagaaccaaccttgagtggtctgggaaggcttcctgggagggtggtgtttgagctaaggccaggcagctgttagatttgttagactgaagcccttgcagacttagagagcttgtgctcttcccagaatgacgggtgagccacgtacagtaaatggtgcttctcatttctagcccaaggggcctcaaggggcaccgtgatttcacgagaatgctgcaagcaaatcttttctcaagctggggaatttggtggtaatgcctggctcagcttgcggtgcgcacctggcctttggaagattggtacagagagaagcggcccatccacatgagcctgtggaacagcactggtgggggagctgatttgtgaagaggggctgtgcagtgtactgtcaggtctgagacccaggaagaaattccagtatcccagctctcagaatcacagagttctaggcactgcctagttccacgtgttcccaaatgtttcctgaatacttggatttcctgtccagagaattttcaaaacaaacttagaggcctgacccatggctgccaaggaaggattttttttttaaattaaattttaaaaatcagtccagcatgaaaatctatgatgatttcataagagaaaggacattttaatattcaaagagtaagaagcacttaatcttggaagaaagggcattcctatactttgattacctttagtttaattaaaaaacacctacatggtctttacttctgtgatttcattcctgggctagtgaaacattgtcacaataaagcatcaggccaacgcttctttcgacccactggccaatcagttgacaaacagtgactagatgtttcagcctattttgctgaggctaaaggattgaactagtgcttcagccagcatgaaaaccagtcaggagtccgtgctggtgttggcttagattagcagggcctttgatggaggggcatgtatgtgtttgggtttgctgtgccaggcaggggagcagtggaatttgtctgaattgagctcacacattgaagttattgagcgacttacatgcaaggccatgacctggactcccagccgagaggcccacgtggcggggcttgagctgggggagccgaggacagcttacatctgctcatctgcttacgtaaccctgcctcccagcttccagagccaagaaaacacacaagccagcccagcggggccgagagcctgtggtagcacacgccatgcgccgcacagcaagggcgccttggctcggcttgaggcctgtcatgaagccctcagccctctgcctcctcccagagcttctccccaccaccccaggcagtggctctgaaacctggtcgcaggtctgcatgattctgaacagaggtagtcgttgccttcctggagtctgagctctctggagtttctcactgggacagagccaggtgtgtagcagagcatggtccctgcagtatggcaggaggtgtgcagggcattcaggaggcctcctggctggcactcgacccaattagtcattcaacgccaggtctggggctgctgtctgttgtctcaaaggtgtgagctgcaagatccttagagttgtggagaaaaaattgccagattggcaagaagggcaggattgggggtcaaggtgtctcagtgtgttggaagcatgatgggggttgtgcaaggggcacagcgagttcagaagggagcaggagagtgagaagaggctgttcagtgataaagctctgcacagagccattggaggagcaagctccttgaccatccttaaaccagggtaattttcatttaggttctgccacacgctcagcagggaactcctggaaggcaggatttgtcttgtccatcctccctccctacctcaacccactcctccttgggctggcacacagtaggtacccagaaagtatcaattgaaacaaattgaaagtggtcttgatacatatcacagggcaagtttgcagttaacagacatttcagagtaaagactctctggcttggtgctcgatcggcttctgtgggttgtcagcatgctgtggacagccccggcatgggagcgagtgggcgtgtgtgtgtgtgtatgtgagggtgagagagcgttagtgtgtgtgttggggttggggagagaggagggggaatagaagatggaccacccgggtatcagcttctgccctggggagatggtggtgtcagttgctgagggaatcctgagaagcaggtctggctgtaggtggtgatggtggtggggttgcatgagaatccatttggggcaggttgaatttgaggtgcccatgacatatggctagccatgttctgttggctgtgaggtcaggagagagacatgagatggaaacagaggtttgggaactgtcatgtgcttaaaccaaagacctgggtatagggagagtgagaagagaagggggcaaagatggacatccaagaaagaagctgagaaagcctaggaatttgaggtaagaggagacgtaggtaaatgtgacgcttggtgatcaaggcttctttccacctctcctatgctggacactcacgtctcctgtctgcttggaaattcatgctgagggcagggaaggtgggagcaaggatttgtctaaagatcttgctttggatccctgcactcctcctggtttaccaagtgtcactggacacgtcagggcgttctgagaccttagagagcatccagtcctgtccctgcagtttacaaatgaggaaaccagtaccctgagagtggctgtactatccactctcaggataccaaagatcatctggaaagtcactggtggagctggaccggggcccaggcatctcttctcctgtccggggctcttgacttcaggaccacctttctgaaacccatgatggggcaacaccaggacactttccagcctgcaggtgtctgtcccgcggaagcgagccaggccacatgtgaattcctgttttctgggtgggtttcagaaggtacgagcaagtcggcagggtgacagcccaggtgcttcttgggttccccaaaacgcggttatgtttagcagcatcctcagaaccaaaggtggggtgggggctgcagatgttgtgggggccctctgaagtgaaaagagccctgtgacagatcttttcttcatgtttttcacaagttcactgtgcagcagggcccccccagtagcctttgcccagggttgggtgttgggcagcccaggcctggctgaccttgtggggaagggtgtgaatggtgggaatccccgagggccctctttgcccgaaagccctaagccttgacatcagatgcccatcagatggtccatcggagccctactacccagcttgcccagtgagaatcatctgggctccttgttaggtagccatttaggtccttcccaaaatccacagactctctaagggaagggcccgagatgctgtacttgtactaacttcctcaagcaattcttgtgataggtttgggaaaaacttgtccagggtgaccactgactgagtcctggtcttctctgaagagcacagtgcctgctcactttagggcaccctgggaggtgggagctggctcagcaggcagtcttataagggactgagcttcaaggcctctgtccctccaggagggaggtgcatgaccagagagggaggcctgaggatcttcttccctgccccagagggtctgctgcctgagctctgtgatagcgcagagagtaaaaggatcaagcttgattgaggcctatctctcaatgcgaaagtttgctagttaagaggagagtgggaagggcatttctggcaaagagaaaagtgtggacaggcatggcttaagggatggggagggagacagacagagctgagggtgaagggccttttgctcagctgtgggccttggccttcccttgtgcagggacacacagccttagagccactggaggttttagtgggaaagtaatatggtcggggctgtatctcagaagaaaacaaactaatgggaacaggtcctgtgatggtggacctgggtcagctacggagggagggaagatgtgagatgtgtactggggaagggggtggaagtggcagctatctggtgagaggaagcaggcccacagctttttttctcaagctgttgaattcagaagggcgagtgattccgggagtagggggtgcttggagagccacgcgttattgataaacagggcaggctgaagcctgctcactggccctgggcgggttctcaccagcatgtttcaggttttgatctgtgcttgtggttggtgttcctacctgttctctaggttccttcctttgttcttgtggctcatttgcttcacaggtgaagctggttacactagagtaacagttcccaaagtgtgttccctggaaaaatggttctgtagccaaataagcttgggaaatggtgggttaaatataacgaagggggtttttcgactgcacaacttctcagagcctttggtgtgtgtcgtgactttgcagaagcaggatttaatacgcagcattcccgttcttatttgaccacgagacatgtttttccattaagcatcttgctgggtctgatgttttctggaacccattttgaggcggtctggtctgcagagagtatggggagcctgggttcaagccttggctcttgactctcagcagagccttgattccctgtgttgcctggactgcaccacgtgtaccacatacccggtatgtgacgttttcctcatccctcttcccacctgccgttacctcacaatccacaatctgcacctcatccatttttcttctgaggcaagcactctcttactaacttacttatctcatctgcatccatgttcttctaggccagaaacttgggagtcatccctccctctttgttacttcttcttcctctttgttactttatcccctctgttactaaacattcttctgtgtttccagctatttcttttattttccctcggtctcctttggggtttctttgcctccatctctcccagaccttggttcaccttccatcgagtcccttcctgggacatgggcactcatgccactcctgctaccttccacttcgaagctaactccctccacactgacgtccccaacatgcatgcatacacacacacacacacacacacacatacacacacacacacacacacttccccagttaggctagaatcagagagatgatgtcagccatttgtccaaggccacgcagctgggaggtcacagagctaagtctcaacctcaggggttttgagaaattgccttctcatccgtgatcactgatttctacaacagcctgtcaggaagtctgggtagaaattacttccattttacagtggagtcagagcggggagggtcctgggcaggcgagtgcttcacagagtgaccaaccatctaggtttgccccacactgaagggggtttctggggatggttggtcaccctaatgctggatgtggtgcctgatgctgggcaggagggccctctccgtggccacgttgcctcccaggaggagacatttcctctgcagctgcagctgcagcctggccatctgatgcagcctgtggagcggtggcgagtcctgtggcctgctaacttctccctccctccacctctctagtgggccccatgctgattgagtttaacatgcctgtggacctggagctcgtggcaaagcagaacccaaatgtgaagatgggcggccgctatgcccccagggactgcgtctctcctcacaaggtggccatcatcattccattccgcaaccggcaggagcacctcaagtactggctatattatttgcacccagtcctgcagcgccagcagctggactatggcatctatgttatcaaccaggtgaggcctgggaaggtggaatgagagagggtgtgtgtgcatgcagatgtgtatcagatgtgtgtgtaatgagggcaggggaaggggagtgatttcacagacacctggcacttacagcgaggaaccagccccccagccaccaccagtgcagatgaggtaaacgccaaacagtgtgcttgcctattgctgtcaactctatagccaagggaaatgctggagtgttttcgttgttctgtttttgttttctggaagtagccttccagcaagattgggaaaaaagacaaccctaattattccaaagtacacactgattattccctggctttgtgtagctgtgtattttccttttaaaaataaaaccaccatttagatgtcagacttttaggtaacttcaaagtttatccagtcagtcagagcgtgtctcctggggcacctggagacagtgcccttagttcaggtcacatgcctacatgccagcccctggtgaaatatctggagaagtctgattcgtgggccatctgagagttatgtggactgggccgagtctgagaaaaagtttctcactgctcgtctgatccatatgtgttgggctttagccctgcttaggaaagtaatgctaaggataggtcaactttcatcaccatggcatggagaatcagattgatctaagaggcatctttattgaaataaatttttcagtttatttgaggagcattattttcccaagagtataactttgatatttcaagattacccctaacacttaaattcatgtttttagactataacctcctaggtgcaatgacacatctaacttatctaagcacccagtttcattgaaattcatttgaagagtctgagtacgcccatttctacaaggcccaatgtccatttcatttcgagataaactctgctttaggtaggaggattgttggcagtttacggcttccatcaaggtcaaggaactctgtgcaccttccctatgaccccaggggaagcactcgaggactgctgtggcattgtgctgcatcacttgctgcagggagattctgaagaagtgtaaggtctcagtcctgccctgtcccgaagcctccaacccacttctggcaagtgggaccttcccagggaacaatttgttaacagacccaaatatcctgtgattggatggtggctgccaaatgctttggaagctcagaggaaggagagagagcaatggcttggaagaaccaggatataaactaggttctaaagtctgcagggagatgggcttctcagctggggccagtgagcagggaccttaaggcagaaaggagccttgcatgttcctggaaattgagatgcccactggggtaggaaagcaccagaagctctgggaccaggtgtcagagttaagcctgtgaggcaggagagagcagaacaagccctgttacaaggaaactgaagcaggagagcaggtggtgggcaaaccccttgaggctgtttgaattcttcggccaagtgaggtacagaccagggccctatgaacacctgcaagcaagacagccacgcagttgtgggtcaccttggaagaatattggagaatgcaagagagaacaggtaaatgtcctgcaaaatgcgggtcactttaacccaacacatattcatttaagaaaagctctgtgattgagaaacatttgtctgatgccagttagcacataccaatgacggcaagattcaggagcctgttattaaagcagtggcagcgagcacctggaagaggcggccaccatcaccaggagccagcagggatgactaataagccgtgccagctgcatctcgtttctctcttgacagttgctatgccagtagatgagggatgtactgtggatacaatgctgtcatatcttattcagcagggcatctgatagcatcccacaaatctgcctgagtagaagacagacagctgtggtctgggtgccatataggtaggttaaaatatatatttgggcctaggcgcagtggctcatgcctgtaatcccagcactttgggaggccaaggcaggcggatcacttgaagtcaggagttcaagaccagcctggccaacatggcgaaaccccgtctctactaaaaatacaaaaattagctggacatagtggtgggcggctgtaatcccagctactcgggaggctgaggcaggagaatctcttgaacccaggaggcagaggttgcagtgagccgagatcatgccactgcactccagcctgggcaacagagtgagactctgtctcaaaaaaataaaataaataaataaataaataaaatatatacttgggtaaagaggataaaagagttagcgatgatgctgaatttttgaactgaggtggctgttttcaaggaagactggagggtgggatgctacgtctagatatgttgcagtttaggtgaatgtgagacttccctgttttgaagtcaaatattggaccagtaaaatctagccatcagcttaaattcctatgatacaatttacatactccccaggctcaacacagtagatttctgaatgtcctctgccagctacatgctcctgcccacctcaatccgagtagatggaacaactaaccaagccagctcagaccggtggcacagctgtgctggctaacactgggcaccacctaagagagtgcttctccaaaagtgtgcttccccaaatggagcgaaatacgcttgaggaatgttgggttgaaccatgtaaagcaggtctcattcccgcagagcctttggtaccccggtgtacactgtaaccccagaagtgtttcctgagcttgcctgacgagacaacttttccaagaaccgtctcaagtgatgagtgttttgtgagtcacactttggggaaagcgggcctaagttagcatctcctcccagctgcctccctgctttccctggaacactaggaactgcccgtcctccctccctccctcctcttcccacttcacaacttagcatcaggaatattttagttttggtttttcaaacatatatacctccttttttcttatcttgtcaatatcatcttttttttttctttgcttttcctcatacttttttttctcttcatcctttccttctccaagggttaactttccaccttaggagaatcttttctgctttttctcccacttccccagctactctcttatcatctgctccaatctcaccctaattgatcattttgggaaaatatggtcagagtccagataactaagttgagaaatgcttaaactctgccatacctttccagtaaagaatattacctaataaataataaaatggtaatgggaaacctgaaccctgaaaaaaaagaggtggaaggagaaacatttggagcacatcctgtctacaaattaggaactgcctgtgttatctgttttatggttatattctagaagaagaaagggattttgtagcacctggttttgacctttctgcactgtttgttgagcaaataaaccttatgggctgttagccctctttatagcctctcagcttatccctggcccagacaccctgctgtcattttgacttttcattcccacacacacatacacatgcacacacatgtacacacacacacataccatttaagattagacagaagtaatgctcaaaatggagtggcttctgagacatttagtccaagggttcccaaacaggcttttcagtatcagatttctttctgccccattgaaatgctacacaaccttccgcttacagcaggtcacaagggtttcattctacttgaagtaggggccatgtcccatttccacttccttggcttcccattcagtcactgctaggatttgcctagacccctgaggccagacaatgtagaaacttctgctccatgtcacaggtgaggaaacaggctcagagagggacaggctccgaaagtcacatagacaacagtagggctgcggctcaaaccccagcgtctgactccaggtttagtgccttctcagggcatcagtgacactcctcatggccagggtgcccccagtgttgctcacagtctggtatccagggctgagagtgtgctgtgtgctcagactgcctgggttcagtcctggcactgccactttacagtcagtgacctcaggcaggttacttaagctctgcaggcctcagtttcctccttggtggggagggttatgaggcatccttctcatggtaaaccttcagtaaataccagccgttactaggagggtccactcctgcctctccactctccattcatcctgcctgtttcctctgcctgcttcctctgcctgcttctgtggtggtgaattcttcatggctcccaccgcctcctgctgcacccccactcagggcccgcatcaggacccttcctcctattggtttgaactccttggagtcagagggtaatggatagtggagtgagccaggtggcagaatctcagaggccatcccgggcctataagcctcttcaaaatagggccacgtatcaagctttacacacaggagtgaactttcacaagttgttatgactcatactctgtctatagtaagctgttaaccactcccatttggcttatgcctctgtaattattgtactaacttatatcttaaaataaggatattgaaggaatgagccgggagaggctttcctggttgagatatagaagaacaagagttgctctttttccttaaggtctctcctcccacccctgaccttagctcaccagcatgggagaatactatttgactccttgtactctgagacgtggatttcaagatatagcattccaacttcaacggcagcaagaaaagaagcaacagaaggagaagacatcatagcaaacagggatgcatgctgcatttcctaatactcaaacccggaaacgagacttcactcaaggtgaagggagggcaggtcaccacctggtagcactagccctaaattaaggaatgcagaatgtttgtgggattgcccatcataaaaattacaaaatgagtaaggaatgcaggcacagctggccaggtgggtttgtcacaaccatggcagccctttgccccacagccagtacacagaactggtctctccaattccgattgcatatcttctggcacctctgttcctctccctcagctgcccaggatttttctggttctgaccatgttacttcctcttttaaacctgttagcatttcacgactgcctacaggcaacggtctaaatggtcggaaggcccaagcttagcatccgagaccctgacctacctccagccacttcctcctcctctccacttcactggactccccatctccacccagacacctctgttctcccctctgtgtgcctttgcttatgctgtcccctgtgttcctagtgtgtctctggctatcttttaagcttccctccccaacctcattagttctgtggagcccctggaatagagctgacttctccttccctgctgctcccaggctgctcagaactttctggaaagggatgattatctgagttccagcctcaccccagcccccggactctgagtccctcatgtctgcctcccttctttctctctgaccacacagctggtacatagtcagtacagacgcagtcagtgagtggagcacggggcttctctccaggattcctgcccctttgtttatccctagtctcaggactccctactcctggtcttctgcctaaatctgtgcctcttggaagtgaagcctccgttcccagtggggccaggtcctgacccttgggaacttgcaggatccctcccttgggcctctccccgaagcttccagctcaatgctgaccagagcacaggctgcctgtgacagtccttggggtgacctcccttatcaggaaaaatgcagaaaacctattaataccttagccttgtgattgttaatggtcacaaaactcctttagggtcctttggactcagcacctttatggtctcactttgaattttgaacctcccacctccccccatcccccagagtaaggcaaatggtcttctgattgttcctgcagagggaaggctccacaggtaagcacacgatggccaggaagcagagctggagcctgcctgaaaggctgtggagaaatggagggagggctgccctgaggactctgtctggctttgaagttttctactgtttccttttcttctgtgcactgttttaggatgatggggtgatagttccaggctggttgaggatggatttggagacagtcctttgtaccctcagtgagcaagagtatctgtcaccctacctcagcagttgtctctgtcactggtccaagcagctggttcctacacaaggtcaagatcaactggggagaagcagactcctgggtctatcccattagtgaggacagctgcctgggcttatggcctcattggtttggtttctatcttgatcatctctaccatccccccatcccggccttccattttctacctcagctgtcagtgcacagattgatgtgtgtgggaacggagcttgggaggagtggggtagggctggtcctgtcctgtagcctccccttccttcgggcacttggaccctttggagcttgccggggtggggaatgggagtgggaaggccagggagtgtctctgcaccatcactgtttgagtgttgcccctttgctgtgtgccccacctagtctatgtgtgtctctgttctctggggactcaatttgctggtgaattgcttccatggacattgttctgggaaatgccattttttctgctcacccatgactctgtgacaaggaatgacagcttattaggaatttgtttttgcattggaacagtggtcatcagaatgggccccttttcccttgcagctttgacatttgcctctcttttcctcacctctctcccttgcatccacccttttctctttttcttcttttttgttttccttctagcaggggccttttacctttacttgttaatcctgtttgtagcaaagcaagtggaaggaggagttcctctctgatctgcttcttattctccacctaccttctcttctgtactttccgcctcctagagagagagagagagagaggaatgccgacctaactaccgctgccactgctgctgccaccaccgctgccaccaccaccctggtaatgttcacatgtcctcaaatcaacccagagccagggccctgctggtcagggggaggctatgtaaataatcccatgagtgtgccatcctcaggccctggggtctcctaggcaagaccagggcctctgtgggctctctcggaaatgctgaggttgctggaagccagcccgtcatacagggtctgagagtttaacttcttttaaattaaaccacagttgagctcatgctgtgtgtgtataaacttttgtatcctgctttttccttaaattctttatcatcagcatcttcccatgttatttcatagtcttcatcatcatcactttccataccttcatagtagttgatcgtagaattccatcataattaacttgtcttttctctcttagaagtcccttaggtaatgtccaattttccgtgagtgtaagtaataccataatgaacatcttggagtctgaagtttattctgtgttggtttgttccacatttaggatcattttcccaggctagattttcagatgtgggattatgggttcagatatggtttacacatttttatagttcttaatacagatggccaaattgctttctgaaagagaagcttttcttaagtatttttctccaacttgtatcttaaacatcctgaacatgcttagcaccactgtcttgatatatctgcggaaagccacgtctccacttttcagtgtgtcgggccctgggagaggcaggcatcctgcgctggctccttggagctgggtttaaaattgtctcctctggctgggcgtggtggctcacacctgtaatcccagtactttgggaggccgaggtgggcggatcactaggtcaggagatcgagaccatcctggctaacatggtgaaaccccgtctctactaaaaatacaaaaaattagccgggcgtggtggcgggcacttgaaaagtcccagctactcgggaggctgaggcaggagaatgatatgaacccgggaggcggagcttgcagtgagccgagatcgcgccactgcactccagcctgggcgacagagtgagactccattttaaaaaaacaaacaaacaaaacaaaaaaacaaacaaacaaaaactgtctcttctgtgctcacttcacccagaatccctgttgggctcttcaaggagctcagttctctctgaaagcaactttatagcctcagtccagtctgtgttcctgtgtggcaggggtcaagggtatgctcactcttgagagtggtgtctttggttgaccaagaaccactcccatagcctggtccctaacccttgaaggcccatctctctcactcactggggtgaagagtttaaatctcagatccaagttttgttgagagctctgagctaccatattgctatggttaacaatagttaacaatgttaacaatggttaactatggttaacaatagttaacaatgtttaacaactagagcccagctgggtgtggtggcatgtgctaacagtcccagcttctcaagaggctgaggtgagaagattgctggagtccaggagctcaaggccagcctgggcaacatggcgagaccctgtctcccctgcaaaaaaacaacaacaacaaaagcaaaactagagcccaactgctgtgaactcatggctgagtagatattattagccctccacaaactcagcatttgtataatcccaggctgtttccagtaattctctggggatcatctcccagcctgtccactgttccaggatccacacttaggcctataggaatgccccgtcagagcttctgctgccgctgatctgttactgtttcatgcaacccactcggcctagttccttcctcttactgtctcagtgggcacagaaaagcatacagagggtgtttcagcaaacattgccactggctgcagacctgcccccggatctgtcctgttgagagcttagtgctgcgttcttgcatggtggggaggggtgtggctctgtgatgagccagggcatgtgtataggagcaacagtgtctctcttatcacgtagaagttctgactcattgcgagtcttggctttgggttaatggttccagccatgttgctgctgtgtcttttggtgcaggagaggctgggcacagttggtccctaagccattatggataagggatgtgtctgctgatatacacacatggacctgacatccagggaaggcagggtgattggacagaacagttcttccagaagctgttggaacttggacaagagtggcccttggctttctgtagttggtcatctgtcccctgttgcaatcaggggaaggccacacttgccttccttaaccacagttaggattttcttggggattagaccagattctagcacctgtcctgaacctctcgccccgcccctacaaaggctgcttgcaagtgtagtgcacatacacagggagcaggtggggcatggaagtggaagtggagcccctgcctttggcccttgggggaggcactgtctgcttacccacggttgttgcctcataggaatcatacaacagcttcctaactggtctccttgccttcagttggattggggcacaaatccctccttgacatataaaccatggtttaaggctccctgtggcctaaataaagataaagcttaagtatcttaacaagcacctaacccttctccccagcctcggtgatttggctcatcgctgccttcatgtttcattctggcttcactcattcggaatttcttgtagttccttggctgttctcttttccttaccgcctttacaaatgctctcaccatgcatgcttttctctgctcctacagatgccttctctcccagcaccgcctccagagtctatgtctggtcgattctgtctgctgtctccagtccccatcttgtggcagtctctgctcaatcatttggggattttatatgttttctggcctttcttttgggggcctgtcttctccttctaaaagcagccagttgacctagaaggaagggataactgtaactcttgtctaccaacataagattaggcccaccctttaaaagctgcgtctttgaaagggacacctgcacccagcatgctggcttctcttcaccaagcgtgacttcctacgcatttcacaggcctccagaggtccccctgactctcttctgctgtgagaaactctaatcatgtaagccacaggctaattcccttgagccttaaatgtttttagtaatttcccattcatcagagaagcaggatttgggaggaattttgaagcaaacactacagaaggcagagtctccaggtaggatatctaagagacatttggaatggtctgactgttcaagatggatgggaaagcctcttcctgtaatgatagtagccaacatttgttgtcaggcagtggggccccatttttgagatggggtctctgtcacccaggttggagtgcggtggtgctgtcatggctcactgcaacctcagcctccccgggctgggtcttcttaattctgaaaaacccagcttttaaagggtggacctaatcttatgttggtagacaatgttgtctcatttaatacaatgcacatgctctccccataacacaaaagagggaactgaggcctggaggtgtgatgtaccccaagtcacatagctaataaataaagaagccagcattcctgggattaaaaatgcatgtgtctgtcactgtggtgtatttggtgcttgatcaatgtttacttgagcaaatggaggggcagaggtaccgatgagtgtgctcagtgaggagggcaggagtgaagctgggcgtcttcccgcctcttgtgagtggtggggcttggtgagcttgccagggcctgtctttcttatcaaagaaggtgtgtgccccagtgttacagcatttcacccaaagcagcctagaaaatgcttgacttttctgtcattccggggaggacactttcctcctccactgttctgctggcctggtgtacccacggcccctgatagatgatagcacctgctaaagtgcaccatgcccttccgtctcactgcatcccacagatgaggccaggctgggatgagggagaaagggagggatatatagttcaggttattttggaaaactgcctgaccaattttaagtctgggccggacactggggcatctcaccacgttgaaagggccgtggcaccccgggcggtgaaaggggctggaaccaggtctgcttcttgggcttctcctccagggtgccattgctcatgggccttggctgcagaggtgctcattcgtggttccaaaattccaattcctgggagaggaaaaatgcttagttcagtctcagttaggcctctgcttagatcaaacagccaaggccagtaggcccagtcctatggtagagacatggcctcaaagagccctctgctgcagttgttggggagtgtaccaagagaagggagcattgtcctgggctgggcagccctgggggtctagtgcatagatgtagaaaggctctgttggtatacctccctttgcttgttggaaagtgctcaacggggctgaattgtgtttgacagtgtaagtctgggctggggtgagggttgttacaagattgtcaagatgattaaatgaaatgccatttgaaacacttatccatgccttgtgtatggtatccccaccagtgaatattcacagtatattataataattccaacaacttcataattttcatatgcaatttctaaactttgaacttttttttttttttttttttttttgagacagtgtctcgctctgttgcccaggctggagtgcagtggcgcaatcttggctcactgcaacctccacctcccggcttcaagtgattctcctgcctcagcctcctgagtagctaggaatccaggcgcccgccaccacacccagctaatttttgtatttttagtagagacgggctttcgccatgttggccaggctggtctcaaactcctgacctgaggtgatccaccgccttggccttccaaagtgctaggattacatacgtgagccactgtgcccggcaattttttgtgtttttagtagagatggggtttcaccatgttggccaggctggtctcgaactcctgacctcaagtgatctgcccgcctcagcctccctaatgctgggattacaggtgtgagccaccacgcccagcctaaactttgaatttctttgaacccatgacttacacagaattagctgaacgcagaattccaaatcaactcagcctgtgggacagccaaaaaacacagtgtgcctttgggctccttcactcaccacgcggggttagaaaactttgtcagaggctttaaaaaaggagctcttgtgtgtaaaatgtttccttgattctctttctggtgcctctctttctctaagtggtttgcttccccaagttccccacctgagtctgggtggctgtggcacatctgtgcattctgtacgcacacaggcagccttttggagtgccagtttccaggtcttggttttatttatttatttatttatttttttgagatgggggtctcactctgccgcccaggctggagtgcagtggtgccgtcatggctcactgcaacctcaacctccctgggatcagttgagcctcctacctcagcctccagagtactagggaccaccatgcctggcaaatttttgtaattttttgtagaggcagagtctcaccatgttgctcaggctggtctcgagctcctagactcaagtgatctgcccaccttggcctcccaagtgttaggattacaagtgtgagccaccatgcccagcccaggtcatcttttgagggcatggagagaagactttgagcatcccacttttgagattgtgtaccagtcgcaagcccctatgacacactttttccccaaagtagagggctctgactatgttgatcccaagagagatgggaaagagcattgaatgaggattccaaagtattgggccttagttcgtttcctcatgttggtgttgtgaagattctggttaggataacagcatgtgtgcaggaggctttgtgaactgctgagagtgaggcgtggcaatgtcagtgctaggtttgtccttactaacctggggccatgggaattgataagaccagattcccaactctaccccacaatgtgatccctgtggtgacccctcacagggctctttggtcgagcttcccagaagggatcaccatctgccattgtatgttgaaccccattcattcattcattcattcagccaaccagcaactatttgttgagctcttattgtgtgagaagcagtcttcaaggaactgggtgaataaaaaaaacaaaacatcctaaccttcattgagcttacattcttactgaaagaaaacaaataaaacatacatgtaatcctagcactttgggaggccaaggcaggcggatcacttgaggtcaggaatttgaaaccagcctggccaacgtgaaacccatctctactgaaaattaaaaaaaaaaaaaaaaaaaagccgggcatggtggcacatgcctgtaatcccagctactcgcgaggctaaggcaggagaatcgcttgaatcctggaggcagaggttgcagtgagccaagatcataccattatactccagcctcagtgatgaagcaagactccatctcaaaaataaaaaataaaaataaaaatatgcattccctttgcaccagcacacttggtgcctggggacctcgtggttggcaccctgaagcaggtgtccctcttctgtcttgcacaccttgcttctgtcctggtgtgtatggcatggccttctgccctccatggtgagcactgtgagggcagaggttgagttgggtttgctgtatttctcaggtgcctaggtttgtgcttgacaggtagatggaaggcacacaatgtggtcatcaaacctcagtcaaccatataaggaaggtagaagtgaaaagtcccataggtacccaactaatgtcaccagtttcctggatacctttcctggagtttatttatagtgtgtataaataaatgatgtatgtgtttaaatgcctttttcacctttccttttagagctgcctctttttaacagttccattccattgtatggatgtactatgatttattgaaccagttccctactgattattctgttttttgcagtcttttgttatgatgaacattccacagtgacaatgttgttcatagtcattcacacacatgcaagtccttctgcaggatatatttctagaggggaattgctgactcagaggttttggtactctgtgttgattgtagagtgacggcagaaaagtgaggcccaagagtttcctagtgaccatgtgtagtggacaagtcaccagtccctgtgagtgtttggcccaaaggctttaaggcatttgatatcactgtttttgtttctgcaccaggcgggagacactatattcaatcgtgctaagctcctcaatgttggctttcaagaagccttgaaggactatgactacacctgctttgtgtttagtgacgtggacctcattccaatgaatgaccataatgcgtacaggtgtttttcacagccacggcacatttccgttgcaatggataagtttggattcaggtaagagatactcagtcagaatctgtggtaaacatgtctctctcatgtgttgactaggaaatgcagtcctggcagctcaagagtgcctctttaagctctggagcagaatgcctcctctgagaaatgggtgctttgtattagttgagatggaaagaagagaccagaaatgcctgtagtctctgcacatccagacaaaaacaaattttccccccttttttttttttgtttgttttttgagacagggtctggctctgtcacccaggctggagtgcagtgccgtgatcttggctcaccgcaacctctgcctcccgggttcatgccatcctgtcacctcagcctcctgagtagctgggactacaaacacttgccaccatgcgcagctaatttttgtatattttgtagagatggggttttgctgtattgcccagtctggtctcgaactcctgagctcaagcaatccatctgccttggcctctcgaagtgctggattataggcatgtggcaccatgcctggcctaagaacagtttttagcatttgggaggggctctcatctttaagctccaaatgatactgtattttcttgcttttttctttctcttgccccacaagttttggaaagtaaattggaatagttttcccccactgaattatttagcttgtatacctcagcagatgttccttggcctgttttgttttgtttttgagacagggtcttgctctgtcacccaggctggagtgcagtgacacaatcatggctcactgcagccttgactgcctgggctcaatccatcctgcagcctcagcctcctgagtagttgggactacaggcatgagccagcatgtccagctaattttttatttttagtggagatgaggtctggctatgttgcccaagctgggcttgaactcttgggctcaagtgatcctctcacctcagccttccaaagcattgggattacaggtgtgaaccactgctcccgcccttggccctataagaaggaatgtgattctgttttccagcagggcacaaacttctgcttaaatacaaagcccaaatttttccaccaaaatgcccctagtgaagtggccagcccagatgcccgactagcgtattatccaaagcatattgtcattggtggaaaatggccttatagtccattgttttgtcttaaaagtaaatatataaataaacttgtatattgtttcctaattccgtgtttatattaacataaaagtgttttaaattacctgtcagtggccaggtgcagtggctcgtgcctgtaatcgcagcactttgggaggccgaggcgggcagatcacctgaggtcaggagttcgagaccagcctgaccagcatggtgaaaccctgtctctactaaaaatacaaaaattagccaggtgtggtggcaggtgcctgtaatcccagctactcgggaagctgaggcaggagaattgcttgaacccgggaggcagaggttgcagtgagttgagatcgcgccattgaacttcaacttgggcaacagagcaagactctgtctcagagaaagaaaaaaaaaaacctatcagttgaataacaaaaccctttccttccttgctttaagtgaatctgaagatccaggagctgtgctgcaggtaccctctatgttgggtacccctggtttaggctgactagtacagtgtggttggctcatgtagacagcagaccctttattttagatacaactttttttctttttcttttattttttttgagacagagtcttgcttgtcacccagcctggagtgcagtggcgtgatcatggctcactatagccttaaactccctggctcaagtgatcctctcacctcggctttcctagtagctgggaccacaggtgtgggccagcacccctggctgatttaaaaaaaaaaaaatttttttttttagagatgtctcactatgttacccaggctggtcttgaactcctgggggctcaagcaatcctcctgctttgacctcccaaagtgctgggatgacaggcatgaactactgcacctgctgagatgcaacagctttctgtcagactcattttattctcatcatttcttcctgtcctcccttgctgggagcatgagagctgtgatgggaatataggaatgtatgaagtccttctcccagatcaaaaatcctaacttcttgtcttaaagggaggaaaatttgaatgtaaccttacttttagactcttcagaaatccttctatacccttccgtccccgctttcacccttcctccctctccgtgtgtgtatcttcttctcttgaaacacacaggtttataccctgacccctcttgattcatcccttgaagcacagtggtgaacaaggaaggggcccgtgatgccctaattctttgccacagcaccatgtttgtttcacaaggagcctggcaggtttgggcttggggcagataggggagagaaagcagcagagacagcaaaaccaaatcatgtcagcttggcatgtacttccctctgaaatagctaagaatccatttctgtaaaagcactgattatcagaaaaccttattggcctggccacctttggttcaaaccctcacattaataatgtggacagtagtatgaggtgtgccaaaggtggatgactcagcacctaagtgatgacacctaattacgaataggttcattaaagcagaccccctggggacctttgcttgaggatccttacagtcagaattcctgaatatatttgaaaataataattgcatctttattttcatatgttctgtatggtttggctgacttccccctcaaagtctgagttagagttttccttaatttatgtgatgggtttggtctttttggattccagaaagagctgggtgtggtttggagctgcactcagagtcacacaaaaccacagcctttagagaacccacaggaaggctttggggcacgtcctgattcttgacatttctcatcagtgctgactttgtatcccttaggagttcacaattcataaccactgaaatattaaaatacaaaaagttttggaaggatgagagcccagatgctctactacttgaaaatatgttaaaacataagttcatcattatacattttgctaaatcaggataaagtctgaagtttcaaagaagttttattttagcaaattttcagaaacactgcctcaactgttagggccagtgttctagtcagtatgcctttggaagcatgaaagctggattggtcgataggatgggtgtggaaggggggctgtgactgggtgggtacagagaggctctgaaacaatctcagattccaggagttcctggataaggacttcatgtgcgggaacagagcacaggagaagcagattcctgagccactcaggaagaactgggcctaggcctgctcttgtcactgactggctttctacataaccacagaaacagcactgtgttgtagaaagaggaagatcatactttttgatatctgtgtctaatttaaggtcatctgagccctgatagaaaagcaaaacagacaaaacccttgtaactgctccctcccaccccacccaccatcaaaaaagctttagagaggctggacatggtggctcttgcctgtgatcccagcactttgggaggctaaggtgggtggatcacctgaggtcaggagttcgagaccagcctgaccaatatggtgaaaccccatctgtactaaaaatacaaaaattagccaggtgtggtggcacacgcctgtagtcccagctacttgggaggctgagacaggagaattacttgaaaacctgggaggcggaggttgcagtgagccgagatcacgccattgtactccagcctgggctacagagcgagactccttcaaaaaaaaaaaaaaaaaaagatccggtttggtgtcttacaactgtaatcccagcactttgggaggccgaggccggtggatcacgaggttaagagatcaagaccatcctgaccaacatggtgaaaccctgtctctactaaaaattagctgggcgtggtggcaggcgcctgtagtcccagctcctcaggaggctgaggcagaagaatcgcttgaacccgggaggcggaagttgcagtgagcctagatcgcgcccctgcactccagcctggcaacagagcaagactacgtctcaaaaaaaaaataaataaaaactctagagaagcaaaaagaataactttaaaagtgtttatgttctcagcaagctttattttggggatgtcagaacttaactaaccactgctccttctgtgtgtatgtttttcctccagcctaccttatgttcagtattttggaggtgtctctgctctaagtaaacaacagtttctaaccatcaatggatttcctaataattattggggctggggaggagaagatgatgacatttttaacaggtaatggtcataacttagatatctttctcctctgtcaaccttcacttccagttttttaaccaatgcttggttgttccccaaggactgaccctcagatgggatgcacccctagtcagcccacattcttaggtgtggcttcctacaggtcctgcaggtgctaaaagggatctgtaggaaaatgagtttctgagatttttgtattggcctggaaaaatgtcaaatgggaaccaagtgacggggcaagtttactttgacttgctgcatgccgttttgtactcaaggagtaaaccaatgtcctttgtaaaaatccctcctttcattatggtcccctttcactgtgaaacaagtttccttgagcagaatcctaactgtcttcacagaagctttgtgttatatttttattttggagtattttcacatatacaaaagagatactgtagtataataaacctttgaggacctatccagccccagcaaccattatggcctggtcagttctgtcccatccacatcctggggctctttttaagctggtaaatcattatgatgtgggttgtcatttacagtggtaaaaaacatctatcagtagcatttgaaagaacattctgctcagtcctctggctgtagaggcttcaaccccaccagccaccgatgagcaccttctccctccaggagccagtctgagctcattactgagtttaatatcagaatacaccctggtgcagcctttctaaattgcagtaccagttaacagaaggtgtctgtcagagcaacacccaagtcattcaagttaccattgtgtgcaaacttaacagagacccacgtcttcaatataagccttgaaggaaactccagttttagtatgtagatggggtatcaagtgtgtgcacattgaacatctgctgcatacagagcactgtgccaggcaggcccaggacactgaaaacctggacatagggtccagacagaagcaagcctgcttccacagaggcactcctgggcagacactctggactgatatgacagtgtgcagggccgacaggataccacaggtctgaatggtcagaacagctggggagggagggagcatccgcaggcatctagtcccatgctaacgcagtggcactagaaggatgggtggtgtgtggagcaactttcttgaaagataaaggacctaacactttctatgcaccacttactgtgtgccaggcaaggccaggaatgtttaagtggtctgggatcagccagttctgcctcttaactaactttgctgtcctgctctccaggctttcattttggtcctcattccttttccttggaccaacacagaatcctccaccctgttctggctgcctctagtcttgttctcagccctccatttgtttttttctgccttttcccacatgttctgaagccctccattcgtatactactttccagagacttccccatggctaaaagcattttggaaatactgtatattaggcccctttcagatactggcaaccgtttgtgggatgctctgagaaggcctctgtgacttagcctggcccttttcagcccatcacctgccacgtcctaccccagacccttgtcaccagtccccaggagcttacgttgctccctgagggcactaggcttgctctcacttccatgcctttgcctgtgccatcctggctgcccaaaatgctatggcagatacctgttcatcctcaactgggctctgcctaggcttgctccagcagaggttacaaactctatgcttcttcctctgtgtctccaacctcatcttcctcttctcacctccatcctggccctaaaggccctatgtttgaagcattcacactgtatattctgtggggcacacggccccagtgtctggcacatggtagtcaacaccacaaaccgcagaaccagttgtaaaaggacatggagtcggaatgtgagttttaaccagggtcatgctgggctgggttctggcatgatgctgggttgtgggctgagtgagaacagcaagggtgatggtggatggagcaacagtcttgcagccggggctctcaggccaagtgtatggcagctctgtgataatgactttccctttactctttgcagattagtttttagaggcatgtctatatctcgcccaaatgctgtggtcgggaggtgtcgcatgatccgccactcaagagacaagaaaaatgaacccaatcctcagaggtgcattctttgtttattcatactccttccccctttaggatgaggtaggctgcaggtccgaggctctgggcctagagggaaattgaggtggtcaggttacagtggagagggaggaggaagtacgtgtgatgatttcttcttaagatttttgttttaagacaatctccttgtgctcttttccttgtaggtttgaccgaattgcacacacaaaggagacaatgctctctgatggtttgaactcactcacctaccaggtgctggatgtacagagatacccattgtatacccaaatcacagtggacatcgggacaccgagctagcgttttggtacacggataagagacctgaaattagccagggacctctgctgtgtgtctctgccaatctgctgggctggtccctctcatttttaccagtctgagtgacaggtccccttcgctcatcattcagatggctttccagatgaccaggacgagtgggatattttgcccccaacttggctcggcatgtgaattcttagctctgcaaggtgtttatgcctttgcgggtttcttgatgtgttcgcagtgtcaccccagagtcagaactgtacacatcccaaaatttggtggccgtggaacacattcccggtgatagaattgctaaattgtcgtgaaataggttagaatttttctttaaattatggttttcttattcgtgaaaattcggagagtgctgctaaaattggattggtgtgatctttttggtagttgtaatttaacagaaaaacacaaaatttcaaccattcttaatgttacgtcctccccccacccccttctttcagtggtatgcaaccactgcaatcactgtgcatatgtcttttcttagcaaaaggattttaaaacttgagccctggaccttttgtcctatgtgtgtggattccagggcaactctagcatcagagcaaaagccttgggtttctcgcattcagtggcctatctccagattgtctgatttctgaatgtaaagttgttgtgtttttttttaaatagtagtttgtagtattttaaagaaagaacagatcgagttctaattatgatctagcttgattttgtgttgatccaaatttgcatagctgtttaatgttaagtcatgacaatttatttttcttggcatgctatgtaaacttgaatttcctatgtatttttattgtggtgttttaaatatggggaggggtattgagcattttttagggagaaaaataaatatatgctgtagtggccacaaataggcctatgatttagctggcaggccaggttttctcaagagcaaaatcaccctctggccccttggcaggtaaggcctcccggtcagcattatcctgccagacctcggggaggatacctgggagacagaagcctctgcacctactgtgcagaactctccacttccccaaccctccccaggtgggcagggcggagggagcctcagcctccttagactgacccctcaggcccctaggctggggggttgtaaataacagcagtcaggttgtttaccagccctttgcacctccccaggcagagggagcctctgttctggtgggggccacctccctcagaggctctgctagccacactccgtggcccaccctttgttaccagttcttcctccttcctcttttcccctgcctttctcattccttccttcgtctccctttttgttcctttgcctcttgcctgtcccctaaaacttgactgtggcactcagggtcaaacagactatccattccccagcatgaatgtgccttttaattagtgatctagaaagaagttcagccgaacccacaccccaactccctcccaagaacttcggtgcctaaagcctcctgttccacctcaggttttcacaggtgctcccaccccagttgaggctcccacccacagggctgtctgtcacaaacccacctctgttgggagctattgagccacctgggatgagatgacacaaggcactcctaccactgagcgcctttgccaggtccagcctgggctcaggttccaagactcagctgcctaatcccagggttgagccttgtgctcgtggcggaccccaaaccactgccctcctgggtaccagccctcagtgtggaggctgagctggtgcctggccccagtcttatctgtgcctttactgctttgcgcatctcagatgctaacttggttctttttccagaagcctttgtattggttaaaaattattttccattgcagaagcagctggactatgcaaaaagtatttctctgtcagttccccactctataccaaggatattattaaaactagaaatgactgcattgagagggagttgtgggaaataagaagaatgaaagcctctctttctgtccgcagatcctgacttttccaaagtgccttaaaagaaatcagacaaatgccctgagtggtaacttctgtgttattttactcttaaaaccaaactctaccttttcttgttgttttttttttttttttttttttttttttggttaccttctcattcatgtcaagtatgtggttcattcttagaaccaagggaaatactgctccccccatttgctgacgtagtgctctcatgggctcacctgggcccaaggcacagccagggcacagttaggcctggatgtttgcctggtccgtgagatgccgcgggtcctgtttccttactggggatttcagggctgggggttcagggagcatttccttttcctgggagttatgaccgcgaagttgtcatgtgccgtgcccttttctgtttctgtgtatcctattgctggtgactctgtgtgaactggcctttgggaaagatcagagagggcagaggtggcacaggacagtaaaggagatgctgtgctggccttcagcctggacagggtctctgctgactgccaggggcgggggctctgcatagccaggatgacggctttcatgtcccagagacctgttgtgctgtgtattttgatttcctgtgtatgcaaatgtgtgtatttaccattgtgtagggggctgtgtctgatcttggtgttcaaaacagaactgtatttttgcctttaaaattaaataatataacgtgaataaatgaccctatctttgtaactgcaggtggtttctgtttgccaggtgtaagggttgtcatggctgtgggatggggtggggacagggtcattccctggtctgtgacccatacaaatacacatgcctccctggaatcagacatttccccatctgaacttcattctcttatctgtaaaatgggaataataacacatagggacttttttgaggcttaaaagtgacgatatatgtaaaacaatgactaatgcctcacaagtactcactacatagtagctagtgccatttcaaagtagaatttttttcccctagcagttcttgggccacattctgctattttcaacagataccaggatcattcagatgtagatctcagggccatttgcaccaggtgctcacagtgtaacttgaagggaattatccaaaatgaggtttcttgtcagtctcaggaaatgtaaccataagctctaaaaggtcttagtttttacccaggtgcctcctccttggtggccctgggtcaggctggttggattgaattggcactcctgaagaagggctgcaggaaaccagtgagcaggagagccacccttggcagggagctgcaggccctgcctgcatgtcactgctggagggatccctggtgacctcaggcctgtgcaaaggtggcctggggttcagatctggccttcaaacaggacaactctggtcctttggacaaaatgctgccttagagggtctgacaaaattaaaaacaaacaaaaaaaaacctgtttctttccttctcacacaccaccactcacaacacttcagttctgcccctagatatgtagggatttctccccaccaacaagcagttttctagtggacactagctgggtgtcctacagtttaactcaattctgacactgtctgcctggagatagcaacggatcccacaggttgagggctcagtctcacaagactgcctccactgcagatgccagtcacaagtagttggttgtgacctatgctttacaaaaatgttttttggatacagggccttgctgtgtcacccaggctggcctgaaactcctgggctcacacaatcctcccgccacaacttagaagtagctgagctgcaggtttataccactcacccagctatagttgtgacctatacttctgaccaaccagctataaattggggtttctatgagcctcttcttgggtttaatttgctaggtcagcttacagaactcagtgtaacacttaacatttactggtcttattataagtgatattagaaaggatactgatgaagaaccggatggagagatgcatagggcaaggcatgggggagggggagagaagcttccatgccctctccaggggctccaccctccagacacctccacgtgttcagctatctggaagctcatctgaccctgtccttctggtttttatggaagcttcatcacataggcctgatagactacatcatcggccattgccagtcagctcaaccttcagcccttttccccttcctgaaggatgggagtgggactgaaagtgccaaccttctcatcatggcttggtctttctggtgaccagtccccatccaggagttcactgagaatcatttcattaaaacaaaagacgttcctatcacccgggaaattccaagggattagaagctctgtcaggaaccagggtcaagcaccaaatattagaacaaaagattctcctagcataaatattagaacaaaagattctcctagcataaatattagaacaaaaaattctcctattgctcaggaaattataagagttttaggggctctgtaccaggaacccagcgcagaggccaaatatatatattttattatctcacagtgccacacaggactttgcaagctgtcaggtctgagtgagatggagcacaccagtgaaaggttaagttcaccctttcactgatgtgctccacttcactgagacacatatccacacagacacacagagacacacacatccacccagacgcacgca

SEQ ID NO: 2 - RNA, 19 nt, Homo sapiens
  source 1..19: mol_type = mRNA
cttgaatttcctatgtatt

SEQ ID NO: 3 - RNA, 19 nt, Homo sapiens
  source 1..19: mol_type = mRNA
aatggatttcctaataatt

SEQ ID NO: 4 - RNA, 19 nt, Homo sapiens
  source 1..19: mol_type = mRNA
tcagtattttggaggtgtc

SEQ ID NO: 5 - RNA, 19 nt, Homo sapiens
  source 1..19: mol_type = mRNA
tggatttcctaataattat

SEQ ID NO: 6 - RNA, 19 nt, Homo sapiens
  source 1..19: mol_type = mRNA
tgaatttcctatgtatttt

SEQ ID NO: 7 - RNA, 19 nt, Homo sapiens
  source 1..19: mol_type = mRNA
gctggatgtacagagatac

SEQ ID NO: 8 - RNA, 19 nt, Homo sapiens
  source 1..19: mol_type = mRNA
ccaaagtgccttaaaagaa

SEQ ID NO: 9 - RNA, 19 nt, Homo sapiens
  source 1..19: mol_type = mRNA
tatgtaaacttgaatttcc

SEQ ID NO: 10 - RNA, 19 nt, Homo sapiens
  source 1..19: mol_type = mRNA
ggcacatttccgttgcaat

SEQ ID NO: 11 - RNA, 19 nt, Homo sapiens
  source 1..19: mol_type = mRNA
atgtaaacttgaatttcct

SEQ ID NO: 12 - RNA, 19 nt, Homo sapiens
  source 1..19: mol_type = mRNA
atggatttcctaataatta

SEQ ID NO: 13 - RNA, 19 nt, Homo sapiens
  source 1..19: mol_type = mRNA
tgtctctgctctaagtaaa

SEQ ID NO: 14 - RNA, 19 nt, Homo sapiens
  source 1..19: mol_type = mRNA
caaagtgccttaaaagaaa

SEQ ID NO: 15 - RNA, 19 nt, Homo sapiens
  source 1..19: mol_type = mRNA
tgaatgtgccttttaatta

SEQ ID NO: 16 - RNA, 19 nt, Homo sapiens
  source 1..19: mol_type = mRNA
acttgaatttcctatgtat

SEQ ID NO: 17 - RNA, 19 nt, Homo sapiens
  source 1..19: mol_type = mRNA
ctgacttttccaaagtgcc

SEQ ID NO: 18 - RNA, 19 nt, Homo sapiens
  source 1..19: mol_type = mRNA
caatggatttcctaataat

SEQ ID NO: 19 - RNA, 19 nt, Homo sapiens
  source 1..19: mol_type = mRNA
ttcagtattttggaggtgt

SEQ ID NO: 20 - RNA, 19 nt, Homo sapiens
  source 1..19: mol_type = mRNA
cctgacttttccaaagtgc

SEQ ID NO: 21 - RNA, 19 nt, Homo sapiens
  source 1..19: mol_type = mRNA
ggatttcctaataattatt

SEQ ID NO: 22 - RNA, 19 nt, synthetic construct
  source 1..19: mol_type = other RNA
aatacataggaaattcaag

SEQ ID NO: 23 - RNA, 19 nt, synthetic construct
  source 1..19: mol_type = other RNA
aattattaggaaatccatt

SEQ ID NO: 24 - RNA, 19 nt, synthetic construct
  source 1..19: mol_type = other RNA
gacacctccaaaatactga

SEQ ID NO: 25 - RNA, 19 nt, synthetic construct
  source 1..19: mol_type = other RNA
ataattattaggaaatcca

SEQ ID NO: 26 - RNA, 19 nt, synthetic construct
  source 1..19: mol_type = other RNA
aaaatacataggaaattca

SEQ ID NO: 27 - RNA, 19 nt, synthetic construct
  source 1..19: mol_type = other RNA
gtatctctgtacatccagc

SEQ ID NO: 28 - RNA, 19 nt, synthetic construct
  source 1..19: mol_type = other RNA
ttcttttaaggcactttgg

SEQ ID NO: 29 - RNA, 19 nt, synthetic construct
  source 1..19: mol_type = other RNA
ggaaattcaagtttacata

SEQ ID NO: 30 - RNA, 19 nt, synthetic construct
  source 1..19: mol_type = other RNA
attgcaacggaaatgtgcc

SEQ ID NO: 31 - RNA, 19 nt, synthetic construct
  source 1..19: mol_type = other RNA
aggaaattcaagtttacat

SEQ ID NO: 32 - RNA, 19 nt, synthetic construct
  source 1..19: mol_type = other RNA
taattattaggaaatccat

SEQ ID NO: 33 - RNA, 19 nt, synthetic construct
  source 1..19: mol_type = other RNA
tttacttagagcagagaca

SEQ ID NO: 34 - RNA, 19 nt, synthetic construct
  source 1..19: mol_type = other RNA
tttcttttaaggcactttg

SEQ ID NO: 35 - RNA, 19 nt, synthetic construct
  source 1..19: mol_type = other RNA
taattaaaaggcacattca

SEQ ID NO: 36 - RNA, 19 nt, synthetic construct
  source 1..19: mol_type = other RNA
atacataggaaattcaagt

SEQ ID NO: 37 - RNA, 19 nt, synthetic construct
  source 1..19: mol_type = other RNA
ggcactttggaaaagtcag

SEQ ID NO: 38 - RNA, 19 nt, synthetic construct
  source 1..19: mol_type = other RNA
attattaggaaatccattg

SEQ ID NO: 39 - RNA, 19 nt, synthetic construct
  source 1..19: mol_type = other RNA
acacctccaaaatactgaa

SEQ ID NO: 40 - RNA, 19 nt, synthetic construct
  source 1..19: mol_type = other RNA
gcactttggaaaagtcagg

SEQ ID NO: 41 - RNA, 19 nt, synthetic construct
  source 1..19: mol_type = other RNA
aataattattaggaaatcc

SEQ ID NO: 42 - RNA, 19 nt, synthetic construct
  source 1..19: mol_type = other RNA
cttgaatttcctatgtatt

SEQ ID NO: 43 - RNA, 19 nt, synthetic construct
  source 1..19: mol_type = other RNA
aatggatttcctaataatt

SEQ ID NO: 44 - RNA, 19 nt, synthetic construct
  source 1..19: mol_type = other RNA
tcagtattttggaggtgtc

SEQ ID NO: 45 - RNA, 19 nt, synthetic construct
  source 1..19: mol_type = other RNA
tggatttcctaataattat

SEQ ID NO: 46 - RNA, 19 nt, synthetic construct
  source 1..19: mol_type = other RNA
tgaatttcctatgtatttt

SEQ ID NO: 47 - RNA, 19 nt, synthetic construct
  source 1..19: mol_type = other RNA
gctggatgtacagagatac

SEQ ID NO: 48 - RNA, 19 nt, synthetic construct
  source 1..19: mol_type = other RNA
ccaaagtgccttaaaagaa

SEQ ID NO: 49 - RNA, 19 nt, synthetic construct
  source 1..19: mol_type = other RNA
tatgtaaacttgaatttcc

SEQ ID NO: 50 - RNA, 19 nt, synthetic construct
  source 1..19: mol_type = other RNA
ggcacatttccgttgcaat

SEQ ID NO: 51 - RNA, 19 nt, synthetic construct
  source 1..19: mol_type = other RNA
atgtaaacttgaatttcct

SEQ ID NO: 52 - RNA, 19 nt, synthetic construct
  source 1..19: mol_type = other RNA
atggatttcctaataatta

SEQ ID NO: 53 - RNA, 19 nt, synthetic construct
  source 1..19: mol_type = other RNA
tgtctctgctctaagtaaa

SEQ ID NO: 54 - RNA, 19 nt, synthetic construct
  source 1..19: mol_type = other RNA
caaagtgccttaaaagaaa

SEQ ID NO: 55 - RNA, 19 nt, synthetic construct
  source 1..19: mol_type = other RNA
tgaatgtgccttttaatta

SEQ ID NO: 56 - RNA, 19 nt, synthetic construct
  source 1..19: mol_type = other RNA
acttgaatttcctatgtat

SEQ ID NO: 57 - RNA, 19 nt, synthetic construct
  source 1..19: mol_type = other RNA
ctgacttttccaaagtgcc

SEQ ID NO: 58 - RNA, 19 nt, synthetic construct
  source 1..19: mol_type = other RNA
caatggatttcctaataat

SEQ ID NO: 59 - RNA, 19 nt, synthetic construct
  source 1..19: mol_type = other RNA
ttcagtattttggaggtgt

SEQ ID NO: 60 - RNA, 19 nt, synthetic construct
  source 1..19: mol_type = other RNA
cctgacttttccaaagtgc

SEQ ID NO: 61 - RNA, 19 nt, synthetic construct
  source 1..19: mol_type = other RNA
ggatttcctaataattatt

SEQ ID NO: 62 - RNA, 19 nt, synthetic construct
  source 1..19: mol_type = other RNA
  modified_base 1: mod_base = OTHER; note = 2'-O-methyl-adenosine
  modified_base 1^2: mod_base = OTHER; note = Phosphorothioate bond
  modified_base 2: mod_base = OTHER; note = 2'-Fluoro-adenosine
  modified_base 2^3: mod_base = OTHER; note = Phosphorothioate bond
  modified_base 3: mod_base = um
  modified_base 4: mod_base = OTHER; note = 2'-Fluoro-adenosine
  modified_base 5: mod_base = cm
  modified_base 6: mod_base = OTHER; note = 2'-Fluoro-adenosine
  modified_base 7: mod_base = um
  modified_base 8: mod_base = OTHER; note = 2'-Fluoro-adenosine
  modified_base 9: mod_base = gm
  modified_base 10: mod_base = OTHER; note = 2'-Fluoro-guanosine
  modified_base 11: mod_base = OTHER; note = 2'-O-methyl-adenosine
  modified_base 12: mod_base = OTHER; note = 2'-Fluoro-adenosine
  modified_base 13: mod_base = OTHER; note = 2'-O-methyl-adenosine
  modified_base 14: mod_base = OTHER; note = 2'-Fluoro-uridine
  modified_base 15: mod_base = um
  modified_base 16: mod_base = OTHER; note = 2'-Fluoro-cytidine
  modified_base 17: mod_base = OTHER; note = 2'-O-methyl-adenosine
  modified_base 17^18: mod_base = OTHER; note = Phosphorothioate bond
  modified_base 18: mod_base = OTHER; note = 2'-Fluoro-adenosine
  modified_base 18^19: mod_base = OTHER; note = Phosphorothioate bond
  modified_base 19: mod_base = gm
aatacataggaaattcaag

SEQ ID NO: 63 - RNA, 19 nt, synthetic construct
  source 1..19: mol_type = other RNA
  modified_base 1: mod_base = OTHER; note = 2'-O-methyl-adenosine
  modified_base 1^2: mod_base = OTHER; note = Phosphorothioate bond
  modified_base 2: mod_base = OTHER; note = 2'-Fluoro-adenosine
  modified_base 2^3: mod_base = OTHER; note = Phosphorothioate bond
  modified_base 3: mod_base = um
  modified_base 4: mod_base = OTHER; note = 2'-Fluoro-uridine
  modified_base 5: mod_base = OTHER; note = 2'-O-methyl-adenosine
  modified_base 6: mod_base = OTHER; note = 2'-Fluoro-uridine
  modified_base 7: mod_base = um
  modified_base 8: mod_base = OTHER; note = 2'-Fluoro-adenosine
  modified_base 9: mod_base = gm
  modified_base 10: mod_base = OTHER; note = 2'-Fluoro-guanosine
  modified_base 11: mod_base = OTHER; note = 2'-O-methyl-adenosine
  modified_base 12: mod_base = OTHER; note = 2'-Fluoro-adenosine
  modified_base 13: mod_base = OTHER; note = 2'-O-methyl-adenosine
  modified_base 14: mod_base = OTHER; note = 2'-Fluoro-uridine
  modified_base 15: mod_base = cm
  modified_base 16: mod_base = OTHER; note = 2'-Fluoro-cytidine
  modified_base 17: mod_base = OTHER; note = 2'-O-methyl-adenosine
  modified_base 17^18: mod_base = OTHER; note = Phosphorothioate bond
  modified_base 18: mod_base = OTHER; note = 2'-Fluoro-uridine
  modified_base 18^19: mod_base = OTHER; note = Phosphorothioate bond
  modified_base 19: mod_base = um
aattattaggaaatccatt

SEQ ID NO: 64 - RNA, 19 nt, synthetic construct
  source 1..19: mol_type = other RNA
  modified_base 1: mod_base = gm
  modified_base 1^2: mod_base = OTHER; note = Phosphorothioate bond
  modified_base 2: mod_base = OTHER; note = 2'-Fluoro-adenosine
  modified_base 2^3: mod_base = OTHER; note = Phosphorothioate bond
  modified_base 3: mod_base = cm
  modified_base 4: mod_base = OTHER; note = 2'-Fluoro-adenosine
  modified_base 5: mod_base = cm
  modified_base 6: mod_base = OTHER; note = 2'-Fluoro-cytidine
  modified_base 7: mod_base = um
  modified_base 8: mod_base = OTHER; note = 2'-Fluoro-cytidine
  modified_base 9: mod_base = cm
  modified_base 10: mod_base = OTHER; note = 2'-Fluoro-adenosine
  modified_base 11: mod_base = OTHER; note = 2'-O-methyl-adenosine
  modified_base 12: mod_base = OTHER; note = 2'-Fluoro-adenosine
  modified_base 13: mod_base = OTHER; note = 2'-O-methyl-adenosine
  modified_base 14: mod_base = OTHER; note = 2'-Fluoro-uridine
  modified_base 15: mod_base = OTHER; note = 2'-O-methyl-adenosine
  modified_base 16: mod_base = OTHER; note = 2'-Fluoro-cytidine
  modified_base 17: mod_base = um
  modified_base 17^18: mod_base = OTHER; note = Phosphorothioate bond
  modified_base 18: mod_base = OTHER; note = 2'-Fluoro-guanosine
  modified_base 18^19: mod_base = OTHER; note = Phosphorothioate bond
  modified_base 19: mod_base = OTHER; note = 2'-O-methyl-adenosine
gacacctccaaaatactga

SEQ ID NO: 65 - RNA, 19 nt, synthetic construct
  source 1..19: mol_type = other RNA
  modified_base 1: mod_base = OTHER; note = 2'-O-methyl-adenosine
  modified_base 1^2: mod_base = OTHER; note = Phosphorothioate bond
  modified_base 2: mod_base = OTHER; note = 2'-Fluoro-uridine
  modified_base 2^3: mod_base = OTHER; note = Phosphorothioate bond
  modified_base 3: mod_base = OTHER; note = 2'-O-methyl-adenosine
  modified_base 4: mod_base = OTHER; note = 2'-Fluoro-adenosine
  modified_base 5: mod_base = um
  modified_base 6: mod_base = OTHER; note = 2'-Fluoro-uridine
  modified_base 7: mod_base = OTHER; note = 2'-O-methyl-adenosine
  modified_base 8: mod_base = OTHER; note = 2'-Fluoro-uridine
  modified_base 9: mod_base = um
  modified_base 10: mod_base = OTHER; note = 2'-Fluoro-adenosine
  modified_base 11: mod_base = gm
  modified_base 12: mod_base = OTHER; note = 2'-Fluoro-guanosine
  modified_base 13: mod_base = OTHER; note = 2'-O-methyl-adenosine
  modified_base 14: mod_base = OTHER; note = 2'-Fluoro-adenosine
  modified_base 15: mod_base = OTHER; note = 2'-O-methyl-adenosine
  modified_base 16: mod_base = OTHER; note = 2'-Fluoro-uridine
  modified_base 17: mod_base = cm
  modified_base 17^18: mod_base = OTHER; note = Phosphorothioate bond
  modified_base 18: mod_base = OTHER; note = 2'-Fluoro-cytidine
  modified_base 18^19: mod_base = OTHER; note = Phosphorothioate bond
  modified_base 19: mod_base = OTHER; note = 2'-O-methyl-adenosine
ataattattaggaaatcca

SEQ ID NO: 66 - RNA, 19 nt, synthetic construct
  source 1..19: mol_type = other RNA
  modified_base 1: mod_base = OTHER; note = 2'-O-methyl-adenosine
  modified_base 1^2: mod_base = OTHER; note = Phosphorothioate bond
  modified_base 2: mod_base = OTHER; note = 2'-Fluoro-adenosine
  modified_base 2^3: mod_base = OTHER; note = Phosphorothioate bond
  modified_base 3: mod_base = OTHER; note = 2'-O-methyl-adenosine
  modified_base 4: mod_base = OTHER; note = 2'-Fluoro-adenosine
  modified_base 5: mod_base = um
  modified_base 6: mod_base = OTHER; note = 2'-Fluoro-adenosine
  modified_base 7: mod_base = cm
  modified_base 8: mod_base = OTHER; note = 2'-Fluoro-adenosine
  modified_base 9: mod_base = um
  modified_base 10: mod_base = OTHER; note = 2'-Fluoro-adenosine
  modified_base 11: mod_base = gm
  modified_base 12: mod_base = OTHER; note = 2'-Fluoro-guanosine
  modified_base 13: mod_base = OTHER; note = 2'-O-methyl-adenosine
  modified_base 14: mod_base = OTHER; note = 2'-Fluoro-adenosine
  modified_base 15: mod_base = OTHER; note = 2'-O-methyl-adenosine
  modified_base 16: mod_base = OTHER; note = 2'-Fluoro-uridine
  modified_base 17: mod_base = um
  modified_base 17^18: mod_base = OTHER; note = Phosphorothioate bond
  modified_base 18: mod_base = OTHER; note = 2'-Fluoro-cytidine
  modified_base 18^19: mod_base = OTHER; note = Phosphorothioate bond
  modified_base 19: mod_base = OTHER; note = 2'-O-methyl-adenosine
aaaatacataggaaattca

SEQ ID NO: 67 - RNA, 19 nt, synthetic construct
  source 1..19: mol_type = other RNA
  modified_base 1: mod_base = gm
  modified_base 1^2: mod_base = OTHER; note = Phosphorothioate bond
  modified_base 2: mod_base = OTHER; note = 2'-Fluoro-uridine
  modified_base 2^3: mod_base = OTHER; note = Phosphorothioate bond
  modified_base 3: mod_base = OTHER; note = 2'-O-methyl-adenosine
  modified_base 4: mod_base = OTHER; note = 2'-Fluoro-uridine
  modified_base 5: mod_base = cm
  modified_base 6: mod_base = OTHER; note = 2'-Fluoro-uridine
  modified_base 7: mod_base = cm
  modified_base 8: mod_base = OTHER; note = 2'-Fluoro-uridine
  modified_base 9: mod_base = gm
  modified_base 10: mod_base = OTHER; note = 2'-Fluoro-uridine
  modified_base 11: mod_base = OTHER; note = 2'-O-methyl-adenosine
  modified_base 12: mod_base = OTHER; note = 2'-Fluoro-cytidine
  modified_base 13: mod_base = OTHER; note = 2'-O-methyl-adenosine
  modified_base 14: mod_base = OTHER; note = 2'-Fluoro-uridine
  modified_base 15: mod_base = cm
  modified_base 16: mod_base = OTHER; note = 2'-Fluoro-cytidine
  modified_base 17: mod_base = OTHER; note = 2'-O-methyl-adenosine
  modified_base 17^18: mod_base = OTHER; note = Phosphorothioate bond
  modified_base 18: mod_base = OTHER; note = 2'-Fluoro-guanosine
  modified_base 18^19: mod_base = OTHER; note = Phosphorothioate bond
  modified_base 19: mod_base = cm
gtatctctgtacatccagc

SEQ ID NO: 68 - RNA, 19 nt, synthetic construct
  source 1..19: mol_type = other RNA
  modified_base 1: mod_base = um
  modified_base 1^2: mod_base = OTHER; note = Phosphorothioate bond
  modified_base 2: mod_base = OTHER; note = 2'-Fluoro-uridine
  modified_base 2^3: mod_base = OTHER; note = Phosphorothioate bond
  modified_base 3: mod_base = cm
  modified_base 4: mod_base = OTHER; note = 2'-Fluoro-uridine
  modified_base 5: mod_base = um
  modified_base 6: mod_base = OTHER; note = 2'-Fluoro-uridine
  modified_base 7: mod_base = um
  modified_base 8: mod_base = OTHER; note = 2'-Fluoro-adenosine
  modified_base 9: mod_base = OTHER; note = 2'-O-methyl-adenosine
  modified_base 10: mod_base = OTHER; note = 2'-Fluoro-guanosine
  modified_base 11: mod_base = gm
  modified_base 12: mod_base = OTHER; note = 2'-Fluoro-cytidine
  modified_base 13: mod_base = OTHER; note = 2'-O-methyl-adenosine
  modified_base 14: mod_base = OTHER; note = 2'-Fluoro-cytidine
  modified_base 15: mod_base = um
  modified_base 16: mod_base = OTHER; note = 2'-Fluoro-uridine
  modified_base 17: mod_base = um
  modified_base 17^18: mod_base = OTHER; note = Phosphorothioate bond
  modified_base 18: mod_base = OTHER; note = 2'-Fluoro-guanosine
  modified_base 18^19: mod_base = OTHER; note = Phosphorothioate bond
  modified_base 19: mod_base = gm
ttcttttaaggcactttgg

SEQ ID NO: 69 - RNA, 19 nt, synthetic construct
  source 1..19: mol_type = other RNA
  modified_base 1: mod_base = gm
  modified_base 1^2: mod_base = OTHER; note = Phosphorothioate bond
  modified_base 2: mod_base = OTHER; note = 2'-Fluoro-guanosine
  modified_base 2^3: mod_base = OTHER; note = Phosphorothioate bond
  modified_base 3: mod_base = OTHER; note = 2'-O-methyl-adenosine
  modified_base 4: mod_base = OTHER; note = 2'-Fluoro-adenosine
  modified_base 5: mod_base = OTHER; note = 2'-O-methyl-adenosine
  modified_base 6: mod_base = OTHER; note = 2'-Fluoro-uridine
  modified_base 7: mod_base = um
  modified_base 8: mod_base = OTHER; note = 2'-Fluoro-cytidine
  modified_base 9: mod_base = OTHER; note = 2'-O-methyl-adenosine
  modified_base 10: mod_base = OTHER; note = 2'-Fluoro-adenosine
  modified_base 11: mod_base = gm
  modified_base 12: mod_base = OTHER; note = 2'-Fluoro-uridine
  modified_base 13: mod_base = um
  modified_base 14: mod_base = OTHER; note = 2'-Fluoro-uridine
  modified_base 15: mod_base = OTHER; note = 2'-O-methyl-adenosine
  modified_base 16: mod_base = OTHER; note = 2'-Fluoro-cytidine
  modified_base 17: mod_base = OTHER; note = 2'-O-methyl-adenosine
  modified_base 17^18: mod_base = OTHER; note = Phosphorothioate bond
  modified_base 18: mod_base = OTHER; note = 2'-Fluoro-uridine
  modified_base 18^19: mod_base = OTHER; note = Phosphorothioate bond
  modified_base 19: mod_base = OTHER; note = 2'-O-methyl-adenosine
ggaaattcaagtttacata

SEQ ID NO: 70 - RNA, 19 nt, synthetic construct
  source 1..19: mol_type = other RNA
  modified_base 1: mod_base = OTHER; note = 2'-O-methyl-adenosine
  modified_base 1^2: mod_base = OTHER; note = Phosphorothioate bond
  modified_base 2: mod_base = OTHER; note = 2'-Fluoro-uridine
  modified_base 2^3: mod_base = OTHER; note = Phosphorothioate bond
  modified_base 3: mod_base = um
  modified_base 4: mod_base = OTHER; note = 2'-Fluoro-guanosine
  modified_base 5: mod_base = cm
  modified_base 6: mod_base = OTHER; note = 2'-Fluoro-adenosine
  modified_base 7: mod_base = OTHER; note = 2'-O-methyl-adenosine
  modified_base 8: mod_base = OTHER; note = 2'-Fluoro-cytidine
  modified_base 9: mod_base = gm
  modified_base 10: mod_base = OTHER; note = 2'-Fluoro-guanosine
  modified_base 11: mod_base = OTHER; note = 2'-O-methyl-adenosine
  modified_base 12: mod_base = OTHER; note = 2'-Fluoro-adenosine
  modified_base 13: mod_base = OTHER; note = 2'-O-methyl-adenosine
  modified_base 14: mod_base = OTHER; note = 2'-Fluoro-uridine
  modified_base 15: mod_base = gm
  modified_base 16: mod_base = OTHER; note = 2'-Fluoro-uridine
  modified_base 17: mod_base = gm
  modified_base 17^18: mod_base = OTHER; note = Phosphorothioate bond
  modified_base 18: mod_base = OTHER; note = 2'-Fluoro-cytidine
  modified_base 18^19: mod_base = OTHER; note = Phosphorothioate bond
  modified_base 19: mod_base = cm
attgcaacggaaatgtgcc

SEQ ID NO: 71 - RNA, 19 nt, synthetic construct
  source 1..19: mol_type = other RNA
  modified_base 1: mod_base = OTHER; note = 2'-O-methyl-adenosine
  modified_base 1^2: mod_base = OTHER; note = Phosphorothioate bond
  modified_base 2: mod_base = OTHER; note = 2'-Fluoro-guanosine
  modified_base 2^3: mod_base = OTHER; note = Phosphorothioate bond
  modified_base 3: mod_base = gm
  modified_base 4: mod_base = OTHER; note = 2'-Fluoro-adenosine
  modified_base 5: mod_base = OTHER; note = 2'-O-methyl-adenosine
  modified_base 6: mod_base = OTHER; note = 2'-Fluoro-adenosine
  modified_base 7: mod_base = um
  modified_base 8: mod_base = OTHER; note = 2'-Fluoro-uridine
  modified_base 9: mod_base = cm
  modified_base 10: mod_base = OTHER; note = 2'-Fluoro-adenosine
  modified_base 11: mod_base = OTHER; note = 2'-O-methyl-adenosine
  modified_base 12: mod_base = OTHER; note = 2'-Fluoro-guanosine
  modified_base 13: mod_base = um
  modified_base 14: mod_base = OTHER; note = 2'-Fluoro-uridine
  modified_base 15: mod_base = um
  modified_base 16: mod_base = OTHER; note = 2'-Fluoro-adenosine
  modified_base 17: mod_base = cm
  modified_base 17^18: mod_base = OTHER; note = Phosphorothioate bond
  modified_base 18: mod_base = OTHER; note = 2'-Fluoro-adenosine
  modified_base 18^19: mod_base = OTHER; note = Phosphorothioate bond
  modified_base 19: mod_base = um
aggaaattcaagtttacat

SEQ ID NO: 72 - RNA, 19 nt, synthetic construct
  source 1..19: mol_type = other RNA
  modified_base 1: mod_base = um
  modified_base 1^2: mod_base = OTHER; note = Phosphorothioate bond
  modified_base 2: mod_base = OTHER; note = 2'-Fluoro-adenosine
  modified_base 2^3: mod_base = OTHER; note = Phosphorothioate bond
  modified_base 3: mod_base = OTHER; note = 2'-O-methyl-adenosine
  modified_base 4: mod_base = OTHER; note = 2'-Fluoro-uridine
  modified_base 5: mod_base = um
  modified_base 6: mod_base = OTHER; note = 2'-Fluoro-adenosine
  modified_base 7: mod_base = um
  modified_base 8: mod_base = OTHER; note = 2'-Fluoro-uridine
  modified_base 9: mod_base = OTHER; note = 2'-O-methyl-adenosine
  modified_base 10: mod_base = OTHER; note = 2'-Fluoro-guanosine
  modified_base 11: mod_base = gm
  modified_base 12: mod_base = OTHER; note = 2'-Fluoro-adenosine
  modified_base 13: mod_base = OTHER; note = 2'-O-methyl-adenosine
  modified_base 14: mod_base = OTHER; note = 2'-Fluoro-adenosine
  modified_base 15: mod_base = um
  modified_base 16: mod_base = OTHER; note = 2'-Fluoro-cytidine
  modified_base 17: mod_base = cm
  modified_base 17^18: mod_base = OTHER; note = Phosphorothioate bond
  modified_base 18: mod_base = OTHER; note = 2'-Fluoro-adenosine
  modified_base 18^19: mod_base = OTHER; note = Phosphorothioate bond
  modified_base 19: mod_base = um
taattattaggaaatccat

SEQ ID NO: 73 - RNA, 19 nt, synthetic construct
  source 1..19: mol_type = other RNA
  modified_base 1: mod_base = um
  modified_base 1^2: mod_base = OTHER; note = Phosphorothioate bond
  modified_base 2: mod_base = OTHER; note = 2'-Fluoro-uridine
  modified_base 2^3: mod_base = OTHER; note = Phosphorothioate bond
  modified_base 3: mod_base = um
  modified_base 4: mod_base = OTHER; note = 2'-Fluoro-adenosine
  modified_base 5: mod_base = cm
  modified_base 6: mod_base = OTHER; note = 2'-Fluoro-uridine
  modified_base 7: mod_base = um
  modified_base 8: mod_base = OTHER; note = 2'-Fluoro-adenosine
  modified_base 9: mod_base = gm
  modified_base 10: mod_base = OTHER; note = 2'-Fluoro-adenosine
  modified_base 11: mod_base = gm
  modified_base 12: mod_base = OTHER; note = 2'-Fluoro-cytidine
  modified_base 13: mod_base = OTHER; note = 2'-O-methyl-adenosine
  modified_base 14: mod_base = OTHER; note = 2'-Fluoro-guanosine
  modified_base 15: mod_base = OTHER; note = 2'-O-methyl-adenosine
  modified_base 16: mod_base = OTHER; note = 2'-Fluoro-guanosine
  modified_base 17: mod_base = OTHER; note = 2'-O-methyl-adenosine
  modified_base 17^18: mod_base = OTHER; note = Phosphorothioate bond
  modified_base 18: mod_base = OTHER; note = 2'-Fluoro-cytidine
  modified_base 18^19: mod_base = OTHER; note = Phosphorothioate bond
  modified_base 19: mod_base = OTHER; note = 2'-O-methyl-adenosine
tttacttagagcagagaca

SEQ ID NO: 74 - RNA, 19 nt, synthetic construct
  source 1..19: mol_type = other RNA
  modified_base 1: mod_base = um
  modified_base 1^2: mod_base = OTHER; note = Phosphorothioate bond
  modified_base 2: mod_base = OTHER; note = 2'-Fluoro-uridine
  modified_base 2^3: mod_base = OTHER; note = Phosphorothioate bond
  modified_base 3: mod_base = um
  modified_base 4: mod_base = OTHER; note = 2'-Fluoro-cytidine
  modified_base 5: mod_base = um
  modified_base 6: mod_base = OTHER; note = 2'-Fluoro-uridine
  modified_base 7: mod_base = um
  modified_base 8: mod_base = OTHER; note = 2'-Fluoro-uridine
  modified_base 9: mod_base = OTHER; note = 2'-O-methyl-adenosine
  modified_base 10: mod_base = OTHER; note = 2'-Fluoro-adenosine
  modified_base 11: mod_base = gm
  modified_base 12: mod_base = OTHER; note = 2'-Fluoro-guanosine
  modified_base 13: mod_base = cm
  modified_base 14: mod_base = OTHER; note = 2'-Fluoro-adenosine
  modified_base 15: mod_base = cm
  modified_base 16: mod_base = OTHER; note = 2'-Fluoro-uridine
  modified_base 17: mod_base = um
  modified_base 17^18: mod_base = OTHER; note = Phosphorothioate bond
  modified_base 18: mod_base = OTHER; note = 2'-Fluoro-uridine
  modified_base 18^19: mod_base = OTHER; note = Phosphorothioate bond
  modified_base 19: mod_base = gm
tttcttttaaggcactttg

SEQ ID NO: 75 - RNA, 19 nt, synthetic construct
  source 1..19: mol_type = other RNA
  modified_base 1: mod_base = um
  modified_base 1^2: mod_base = OTHER; note = Phosphorothioate bond
  modified_base 2: mod_base = OTHER; note = 2'-Fluoro-adenosine
  modified_base 2^3: mod_base = OTHER; note = Phosphorothioate bond
  modified_base 3: mod_base = OTHER; note = 2'-O-methyl-adenosine
  modified_base 4: mod_base = OTHER; note = 2'-Fluoro-uridine
  modified_base 5: mod_base = um
  modified_base 6: mod_base = OTHER; note = 2'-Fluoro-adenosine
  modified_base 7: mod_base = OTHER; note = 2'-O-methyl-adenosine
  modified_base 8: mod_base = OTHER; note = 2'-Fluoro-adenosine
  modified_base 9: mod_base = OTHER; note = 2'-O-methyl-adenosine
  modified_base 10: mod_base = OTHER; note = 2'-Fluoro-guanosine
  modified_base 11: mod_base = gm
  modified_base 12: mod_base = OTHER; note = 2'-Fluoro-cytidine
  modified_base 13: mod_base = OTHER; note = 2'-O-methyl-adenosine
  modified_base 14: mod_base = OTHER; note = 2'-Fluoro-cytidine
  modified_base 15: mod_base = OTHER; note = 2'-O-methyl-adenosine
  modified_base 16: mod_base = OTHER; note = 2'-Fluoro-uridine
  modified_base 17: mod_base = um
  modified_base 17^18: mod_base = OTHER; note = Phosphorothioate bond
  modified_base 18: mod_base = OTHER; note = 2'-Fluoro-cytidine
  modified_base 18^19: mod_base = OTHER; note = Phosphorothioate bond
  modified_base 19: mod_base = OTHER; note = 2'-O-methyl-adenosine
taattaaaaggcacattca

SEQ ID NO: 76 - RNA, 19 nt, synthetic construct
  source 1..19: mol_type = other RNA
  modified_base 1: mod_base = OTHER; note = 2'-O-methyl-adenosine
  modified_base 1^2: mod_base = OTHER; note = Phosphorothioate bond
  modified_base 2: mod_base = OTHER; note = 2'-Fluoro-uridine
  modified_base 2^3: mod_base = OTHER; note = Phosphorothioate bond
  modified_base 3: mod_base = OTHER; note = 2'-O-methyl-adenosine
  modified_base 4: mod_base = OTHER; note = 2'-Fluoro-cytidine
  modified_base 5: mod_base = OTHER; note = 2'-O-methyl-adenosine
  modified_base 6: mod_base = OTHER; note = 2'-Fluoro-uridine
  modified_base 7: mod_base = OTHER; note = 2'-O-methyl-adenosine
  modified_base 8: mod_base = OTHER; note = 2'-Fluoro-guanosine
  modified_base 9: mod_base = gm
  modified_base 10: mod_base = OTHER; note = 2'-Fluoro-adenosine
  modified_base 11: mod_base = OTHER; note = 2'-O-methyl-adenosine
  modified_base 12: mod_base = OTHER; note = 2'-Fluoro-adenosine
  modified_base 13: mod_base = um
  modified_base 14: mod_base = OTHER; note = 2'-Fluoro-uridine
  modified_base 15: mod_base = cm
  modified_base 16: mod_base = OTHER; note = 2'-Fluoro-adenosine
  modified_base 17: mod_base = OTHER; note = 2'-O-methyl-adenosine
  modified_base 17^18: mod_base = OTHER; note = Phosphorothioate bond
  modified_base 18: mod_base = OTHER; note = 2'-Fluoro-guanosine
  modified_base 18^19: mod_base = OTHER; note = Phosphorothioate bond
  modified_base 19: mod_base = um
atacataggaaattcaagt

SEQ ID NO: 77 - RNA, 19 nt, synthetic construct
  source 1..19: mol_type = other RNA
  modified_base 1: mod_base = gm
  modified_base 1^2: mod_base = OTHER; note = Phosphorothioate bond
  modified_base 2: mod_base = OTHER; note = 2'-Fluoro-guanosine
  modified_base 2^3: mod_base = OTHER; note = Phosphorothioate bond
  modified_base 3: mod_base = cm
  modified_base 4: mod_base = OTHER; note = 2'-Fluoro-adenosine
  modified_base 5: mod_base = cm
  modified_base 6: mod_base = OTHER; note = 2'-Fluoro-uridine
  modified_base 7: mod_base = um
  modified_base 8: mod_base = OTHER; note = 2'-Fluoro-uridine
  modified_base 9: mod_base = gm
  modified_base 10: mod_base = OTHER; note = 2'-Fluoro-guanosine
  modified_base 11: mod_base = OTHER; note = 2'-O-methyl-adenosine
  modified_base 12: mod_base = OTHER; note = 2'-Fluoro-adenosine
  modified_base 13: mod_base = OTHER; note = 2'-O-methyl-adenosine
  modified_base 14: mod_base = OTHER; note = 2'-Fluoro-adenosine
  modified_base 15: mod_base = gm
  modified_base 16: mod_base = OTHER; note = 2'-Fluoro-uridine
  modified_base 17: mod_base = cm
  modified_base 17^18: mod_base = OTHER; note = Phosphorothioate bond
  modified_base 18: mod_base = OTHER; note = 2'-Fluoro-adenosine
  modified_base 18^19: mod_base = OTHER; note = Phosphorothioate bond
  modified_base 19: mod_base = gm
ggcactttggaaaagtcag

SEQ ID NO: 78 - RNA, 19 nt, synthetic construct
  source 1..19: mol_type = other RNA
  modified_base 1: mod_base = OTHER; note = 2'-O-methyl-adenosine
  modified_base 1^2: mod_base = OTHER; note = Phosphorothioate bond
  modified_base 2: mod_base = OTHER; note = 2'-Fluoro-uridine
  modified_base 2^3: mod_base = OTHER; note = Phosphorothioate bond
  modified_base 3: mod_base = um
  modified_base 4: mod_base = OTHER; note = 2'-Fluoro-adenosine
  modified_base 5: mod_base = um
  modified_base 6: mod_base = OTHER; note = 2'-Fluoro-uridine
  modified_base 7: mod_base = OTHER; note = 2'-O-methyl-adenosine
  modified_base 8: mod_base = OTHER; note = 2'-Fluoro-guanosine
  modified_base 9: mod_base = gm
  modified_base 10: mod_base = OTHER; note = 2'-Fluoro-adenosine
  modified_base 11: mod_base = OTHER; note = 2'-O-methyl-adenosine
  modified_base 12: mod_base = OTHER; note = 2'-Fluoro-adenosine
  modified_base 13: mod_base = um
  modified_base 14: mod_base = OTHER; note = 2'-Fluoro-cytidine
  modified_base 15: mod_base = cm
  modified_base 16: mod_base = OTHER; note = 2'-Fluoro-adenosine
  modified_base 17: mod_base = um
  modified_base 17^18: mod_base = OTHER; note = Phosphorothioate bond
  modified_base 18: mod_base = OTHER; note = 2'-Fluoro-uridine
  modified_base 18^19: mod_base = OTHER; note = Phosphorothioate bond
  modified_base 19: mod_base = gm
attattaggaaatccattg

SEQ ID NO: 79 - RNA, 19 nt, synthetic construct
  source 1..19: mol_type = other RNA
  modified_base 1: mod_base = OTHER; note = 2'-O-methyl-adenosine
  modified_base 1^2: mod_base = OTHER; note = Phosphorothioate bond
  modified_base 2: mod_base = OTHER; note = 2'-Fluoro-cytidine
  modified_base 2^3: mod_base = OTHER; note = Phosphorothioate bond
  modified_base 3: mod_base = OTHER; note = 2'-O-methyl-adenosine
  modified_base 4: mod_base = OTHER; note = 2'-Fluoro-cytidine
  modified_base 5: mod_base = cm
  modified_base 6: mod_base = OTHER; note = 2'-Fluoro-uridine
  modified_base 7: mod_base = cm
  modified_base 8: mod_base = OTHER; note = 2'-Fluoro-cytidine
  modified_base 9: mod_base = OTHER; note = 2'-O-methyl-adenosine
  modified_base 10: mod_base = OTHER; note = 2'-Fluoro-adenosine
  modified_base 11: mod_base = OTHER; note = 2'-O-methyl-adenosine
  modified_base 12: mod_base = OTHER; note = 2'-Fluoro-adenosine
  modified_base 13: mod_base = um
  modified_base 14: mod_base = OTHER; note = 2'-Fluoro-adenosine
  modified_base 15: mod_base = cm
  modified_base 16: mod_base = OTHER; note = 2'-Fluoro-uridine
  modified_base 17: mod_base = gm
  modified_base 17^18: mod_base = OTHER; note = Phosphorothioate bond
  modified_base 18: mod_base = OTHER; note = 2'-Fluoro-adenosine
  modified_base 18^19: mod_base = OTHER; note = Phosphorothioate bond
  modified_base 19: mod_base = OTHER; note = 2'-O-methyl-adenosine
acacctccaaaatactgaa

SEQ ID NO: 80 - RNA, 19 nt, synthetic construct
  source 1..19: mol_type = other RNA
  modified_base 1: mod_base = gm
  modified_base 1^2: mod_base = OTHER; note = Phosphorothioate bond
  modified_base 2: mod_base = OTHER; note = 2'-Fluoro-cytidine
  modified_base 2^3: mod_base = OTHER; note = Phosphorothioate bond
  modified_base 3: mod_base = OTHER; note = 2'-O-methyl-adenosine
  modified_base 4: mod_base = OTHER; note = 2'-Fluoro-cytidine
  modified_base 5: mod_base = um
  modified_base 6: mod_base = OTHER; note = 2'-Fluoro-uridine
  modified_base 7: mod_base = um
  modified_base 8: mod_base = OTHER; note = 2'-Fluoro-guanosine
  modified_base 9: mod_base = gm
  modified_base 10: mod_base = OTHER; note = 2'-Fluoro-adenosine
  modified_base 11: mod_base = OTHER; note = 2'-O-methyl-adenosine
  modified_base 12: mod_base = OTHER; note = 2'-Fluoro-adenosine
  modified_base 13: mod_base = OTHER; note = 2'-O-methyl-adenosine
  modified_base 14: mod_base = OTHER; note = 2'-Fluoro-guanosine
  modified_base 15: mod_base = um
  modified_base 16: mod_base = OTHER; note = 2'-Fluoro-cytidine
  modified_base 17: mod_base = OTHER; note = 2'-O-methyl-adenosine
  modified_base 17^18: mod_base = OTHER; note = Phosphorothioate bond
  modified_base 18: mod_base = OTHER; note = 2'-Fluoro-guanosine
  modified_base 18^19: mod_base = OTHER; note = Phosphorothioate bond
  modified_base 19: mod_base = gm
gcactttggaaaagtcagg

SEQ ID NO: 81 - RNA, 19 nt, synthetic construct
  source 1..19: mol_type = other RNA
  modified_base 1: mod_base = OTHER; note = 2'-O-methyl-adenosine
  modified_base 1^2: mod_base = OTHER; note = Phosphorothioate bond
  modified_base 2: mod_base = OTHER; note = 2'-Fluoro-adenosine
  modified_base 2^3: mod_base = OTHER; note = Phosphorothioate bond
  modified_base 3: mod_base = um
  modified_base 4: mod_base = OTHER; note = 2'-Fluoro-adenosine
  modified_base 5: mod_base = OTHER; note = 2'-O-methyl-adenosine
  modified_base 6: mod_base = OTHER; note = 2'-Fluoro-uridine
  modified_base 7: mod_base = um
  modified_base 8: mod_base = OTHER; note = 2'-Fluoro-adenosine
  modified_base 9: mod_base = um
  modified_base 10: mod_base = OTHER; note = 2'-Fluoro-uridine
  modified_base 11: mod_base = OTHER; note = 2'-O-methyl-adenosine
  modified_base 12: mod_base = OTHER; note = 2'-Fluoro-guanosine
  modified_base 13: mod_base = gm
  modified_base 14: mod_base = OTHER; note = 2'-Fluoro-adenosine
  modified_base 15: mod_base = OTHER; note = 2'-O-methyl-adenosine
  modified_base 16: mod_base = OTHER; note = 2'-Fluoro-adenosine
  modified_base 17: mod_base = um
  modified_base 17^18: mod_base = OTHER; note = Phosphorothioate bond
  modified_base 18: mod_base = OTHER; note = 2'-Fluoro-cytidine
  modified_base 18^19: mod_base = OTHER; note = Phosphorothioate bond
  modified_base 19: mod_base = cm
aataattattaggaaatcc

SEQ ID NO: 82 - RNA, 19 nt, synthetic construct
  source 1..19: mol_type = other RNA
  modified_base 1: mod_base = OTHER; note = 2'-Fluoro-cytidine
  modified_base 1^2: mod_base = OTHER; note = Phosphorothioate bond
  modified_base 2: mod_base = um
  modified_base 2^3: mod_base = OTHER; note = Phosphorothioate bond
  modified_base 3: mod_base = OTHER; note = 2'-Fluoro-uridine
  modified_base 4: mod_base = gm
  modified_base 5: mod_base = OTHER; note = 2'-Fluoro-adenosine
  modified_base 6: mod_base = OTHER; note = 2'-O-methyl-adenosine
  modified_base 7: mod_base = OTHER; note = 2'-Fluoro-uridine
  modified_base 8: mod_base = um
  modified_base 9: mod_base = OTHER; note = 2'-Fluoro-uridine
  modified_base 10: mod_base = cm
  modified_base 11: mod_base = OTHER; note = 2'-Fluoro-cytidine
  modified_base 12: mod_base = um
  modified_base 13: mod_base = OTHER; note = 2'-Fluoro-adenosine
  modified_base 14: mod_base = um
  modified_base 15: mod_base = OTHER; note = 2'-Fluoro-guanosine
  modified_base 16: mod_base = um
  modified_base 17: mod_base = OTHER; note = 2'-Fluoro-adenosine
  modified_base 18: mod_base = um
  modified_base 19: mod_base = OTHER; note = 2'-Fluoro-uridine
cttgaatttcctatgtatt

SEQ ID NO: 83 - RNA, 19 nt, synthetic construct
  source 1..19: mol_type = other RNA
  modified_base 1: mod_base = OTHER; note = 2'-Fluoro-adenosine
  modified_base 1^2: mod_base = OTHER; note = Phosphorothioate bond
  modified_base 2: mod_base = OTHER; note = 2'-O-methyl-adenosine
  modified_base 2^3: mod_base = OTHER; note = Phosphorothioate bond
  modified_base 3: mod_base = OTHER; note = 2'-Fluoro-uridine
  modified_base 4: mod_base = gm
  modified_base 5: mod_base = OTHER; note = 2'-Fluoro-guanosine
  modified_base 6: mod_base = OTHER; note = 2'-O-methyl-adenosine
  modified_base 7: mod_base = OTHER; note = 2'-Fluoro-uridine
  modified_base 8: mod_base = um
  modified_base 9: mod_base = OTHER; note = 2'-Fluoro-uridine
  modified_base 10: mod_base = cm
  modified_base 11: mod_base = OTHER; note = 2'-Fluoro-cytidine
  modified_base 12: mod_base = um
  modified_base 13: mod_base = OTHER; note = 2'-Fluoro-adenosine
  modified_base 14: mod_base = OTHER; note = 2'-O-methyl-adenosine
  modified_base 15: mod_base = OTHER; note = 2'-Fluoro-uridine
  modified_base 16: mod_base = OTHER; note = 2'-O-methyl-adenosine
  modified_base 17: mod_base = OTHER; note = 2'-Fluoro-adenosine
  modified_base 18: mod_base = um
  modified_base 19: mod_base = OTHER; note = 2'-Fluoro-uridine
aatggatttcctaataatt

SEQ ID NO: 84 - RNA, 19 nt, synthetic construct
  source 1..19: mol_type = other RNA
  modified_base 1: mod_base = OTHER; note = 2'-Fluoro-uridine
  modified_base 1^2: mod_base = OTHER; note = Phosphorothioate bond
  modified_base 2: mod_base = cm
  modified_base 2^3: mod_base = OTHER; note = Phosphorothioate bond
  modified_base 3: mod_base = OTHER; note = 2'-Fluoro-adenosine
  modified_base 4: mod_base = gm
  modified_base 5: mod_base = OTHER; note = 2'-Fluoro-uridine
  modified_base 6: mod_base = OTHER; note = 2'-O-methyl-adenosine
  modified_base 7: mod_base = OTHER; note = 2'-Fluoro-uridine
  modified_base 8: mod_base = um
  modified_base 9: mod_base = OTHER; note = 2'-Fluoro-uridine
  modified_base 10: mod_base = um
  modified_base 11: mod_base = OTHER; note = 2'-Fluoro-guanosine
  modified_base 12: mod_base = gm
  modified_base 13: mod_base = OTHER; note = 2'-Fluoro-adenosine
  modified_base 14: mod_base = gm
  modified_base 15: mod_base = OTHER; note = 2'-Fluoro-guanosine
  modified_base 16: mod_base = um
  modified_base 17: mod_base = OTHER; note = 2'-Fluoro-guanosine
  modified_base 18: mod_base = um
  modified_base 19: mod_base = OTHER; note = 2'-Fluoro-cytidine
tcagtattttggaggtgtc

SEQ ID NO: 85 - RNA, 19 nt, synthetic construct
  source 1..19: mol_type = other RNA
  modified_base 1: mod_base = OTHER; note = 2'-Fluoro-uridine
  modified_base 1^2: mod_base = OTHER; note = Phosphorothioate bond
  modified_base 2: mod_base = gm
  modified_base 2^3: mod_base = OTHER; note = Phosphorothioate bond
  modified_base 3: mod_base = OTHER; note = 2'-Fluoro-guanosine
  modified_base 4: mod_base = OTHER; note = 2'-O-methyl-adenosine
  modified_base 5: mod_base = OTHER; note = 2'-Fluoro-uridine
  modified_base 6: mod_base = um
  modified_base 7: mod_base = OTHER; note = 2'-Fluoro-uridine
  modified_base 8: mod_base = cm
  modified_base 9: mod_base = OTHER; note = 2'-Fluoro-cytidine
  modified_base 10: mod_base = um
  modified_base 11: mod_base = OTHER; note = 2'-Fluoro-adenosine
  modified_base 12: mod_base = OTHER; note = 2'-O-methyl-adenosine
  modified_base 13: mod_base = OTHER; note = 2'-Fluoro-uridine
  modified_base 14: mod_base = OTHER; note = 2'-O-methyl-adenosine
  modified_base 15: mod_base = OTHER; note = 2'-Fluoro-adenosine
  modified_base 16: mod_base = um
  modified_base 17: mod_base = OTHER; note = 2'-Fluoro-uridine
  modified_base 18: mod_base = OTHER; note = 2'-O-methyl-adenosine
  modified_base 19: mod_base = OTHER; note = 2'-Fluoro-uridine
tggatttcctaataattat

SEQ ID NO: 86 - RNA, 19 nt, synthetic construct
  source 1..19: mol_type = other RNA
  modified_base 1: mod_base = OTHER; note = 2'-Fluoro-uridine
  modified_base 1^2: mod_base = OTHER; note = Phosphorothioate bond
  modified_base 2: mod_base = gm
  modified_base 2^3: mod_base = OTHER; note = Phosphorothioate bond
  modified_base 3: mod_base = OTHER; note = 2'-Fluoro-adenosine
  modified_base 4: mod_base = OTHER; note = 2'-O-methyl-adenosine
  modified_base 5: mod_base = OTHER; note = 2'-Fluoro-uridine
  modified_base 6: mod_base = um
  modified_base 7: mod_base = OTHER; note = 2'-Fluoro-uridine
  modified_base 8: mod_base = cm
  modified_base 9: mod_base = OTHER; note = 2'-Fluoro-cytidine
  modified_base 10: mod_base = um
  modified_base 11: mod_base = OTHER; note = 2'-Fluoro-adenosine
  modified_base 12: mod_base = um
  modified_base 13: mod_base = OTHER; note = 2'-Fluoro-guanosine
  modified_base 14: mod_base = um
  modified_base 15: mod_base = OTHER; note = 2'-Fluoro-adenosine
  modified_base 16: mod_base = um
  modified_base 17: mod_base = OTHER; note = 2'-Fluoro-uridine
  modified_base 18: mod_base = um
  modified_base 19: mod_base = OTHER; note = 2'-Fluoro-uridine
tgaatttcctatgtatttt

SEQ ID NO: 87 - RNA, 19 nt, synthetic construct
  source 1..19: mol_type = other RNA
  modified_base 1: mod_base = OTHER; note = 2'-Fluoro-guanosine
  modified_base 1^2: mod_base = OTHER; note = Phosphorothioate bond
  modified_base 2: mod_base = cm
  modified_base 2^3: mod_base = OTHER; note = Phosphorothioate bond
  modified_base 3: mod_base = OTHER; note = 2'-Fluoro-uridine
  modified_base 4: mod_base = gm
  modified_base 5: mod_base = OTHER; note = 2'-Fluoro-guanosine
  modified_base 6: mod_base = OTHER; note = 2'-O-methyl-adenosine
  modified_base 7: mod_base = OTHER; note = 2'-Fluoro-uridine
  modified_base 8: mod_base = gm
  modified_base 9: mod_base = OTHER; note = 2'-Fluoro-uridine
  modified_base 10: mod_base = OTHER; note = 2'-O-methyl-adenosine
  modified_base 11: mod_base = OTHER; note = 2'-Fluoro-cytidine
  modified_base 12: mod_base = OTHER; note = 2'-O-methyl-adenosine
  modified_base 13: mod_base = OTHER; note = 2'-Fluoro-guanosine
  modified_base 14: mod_base = OTHER; note = 2'-O-methyl-adenosine
  modified_base 15: mod_base = OTHER; note = 2'-Fluoro-guanosine
  modified_base 16: mod_base = OTHER; note = 2'-O-methyl-adenosine
  modified_base 17: mod_base = OTHER; note = 2'-Fluoro-uridine
  modified_base 18: mod_base = OTHER; note = 2'-O-methyl-adenosine
  modified_base 19: mod_base = OTHER; note = 2'-Fluoro-cytidine
gctggatgtacagagatac

SEQ ID NO: 88 - RNA, 19 nt, synthetic construct
  source 1..19: mol_type = other RNA
  modified_base 1: mod_base = OTHER; note = 2'-Fluoro-cytidine
  modified_base 1^2: mod_base = OTHER; note = Phosphorothioate bond
  modified_base 2: mod_base = cm
  modified_base 2^3: mod_base = OTHER; note = Phosphorothioate bond
  modified_base 3: mod_base = OTHER; note = 2'-Fluoro-adenosine
  modified_base 4: mod_base = OTHER; note = 2'-O-methyl-adenosine
  modified_base 5: mod_base = OTHER; note = 2'-Fluoro-adenosine
  modified_base 6: mod_base = gm
  modified_base 7: mod_base = OTHER; note = 2'-Fluoro-uridine
  modified_base 8: mod_base = gm
  modified_base 9: mod_base = OTHER; note = 2'-Fluoro-cytidine
  modified_base 10: mod_base = cm
  modified_base 11: mod_base = OTHER; note = 2'-Fluoro-uridine
  modified_base 12: mod_base = um
  modified_base 13: mod_base = OTHER; note = 2'-Fluoro-adenosine
  modified_base 14: mod_base = OTHER; note = 2'-O-methyl-adenosine
  modified_base 15: mod_base = OTHER; note = 2'-Fluoro-adenosine
  modified_base 16: mod_base = OTHER; note = 2'-O-methyl-adenosine
  modified_base 17: mod_base = OTHER; note = 2'-Fluoro-guanosine
  modified_base 18: mod_base = OTHER; note = 2'-O-methyl-adenosine
  modified_base 19: mod_base = OTHER; note = 2'-Fluoro-adenosine
ccaaagtgccttaaaagaa

SEQ ID NO: 89 - RNA, 19 nt, synthetic construct
  source 1..19: mol_type = other RNA
  modified_base 1: mod_base = OTHER; note = 2'-Fluoro-uridine
  modified_base 1^2: mod_base = OTHER; note = Phosphorothioate bond
  modified_base 2: mod_base = OTHER; note = 2'-O-methyl-adenosine
  modified_base 2^3: mod_base = OTHER; note = Phosphorothioate bond
  modified_base 3: mod_base = OTHER; note = 2'-Fluoro-uridine
  modified_base 4: mod_base = gm
  modified_base 5: mod_base = OTHER; note = 2'-Fluoro-uridine
  modified_base 6: mod_base = OTHER; note = 2'-O-methyl-adenosine
  modified_base 7: mod_base = OTHER; note = 2'-Fluoro-adenosine
  modified_base 8: mod_base = OTHER; note = 2'-O-methyl-adenosine
  modified_base 9: mod_base = OTHER; note = 2'-Fluoro-cytidine
  modified_base 10: mod_base = um
  modified_base 11: mod_base = OTHER; note = 2'-Fluoro-uridine
  modified_base 12: mod_base = gm
  modified_base 13: mod_base = OTHER; note = 2'-Fluoro-adenosine
  modified_base 14: mod_base = OTHER; note = 2'-O-methyl-adenosine
  modified_base 15: mod_base = OTHER; note = 2'-Fluoro-uridine
  modified_base 16: mod_base = um
  modified_base 17: mod_base = OTHER; note = 2'-Fluoro-uridine
  modified_base 18: mod_base = cm
  modified_base 19: mod_base = OTHER; note = 2'-Fluoro-cytidine
tatgtaaacttgaatttcc

SEQ ID NO: 90 - RNA, 19 nt, synthetic construct
  source 1..19: mol_type = other RNA
  modified_base 1: mod_base = OTHER; note = 2'-Fluoro-guanosine
  modified_base 1^2: mod_base = OTHER; note = Phosphorothioate bond
  modified_base 2: mod_base = gm
  modified_base 2^3: mod_base = OTHER; note = Phosphorothioate bond
  modified_base 3: mod_base = OTHER; note = 2'-Fluoro-cytidine
  modified_base 4: mod_base = OTHER; note = 2'-O-methyl-adenosine
  modified_base 5: mod_base = OTHER; note = 2'-Fluoro-cytidine
  modified_base 6: mod_base = OTHER; note = 2'-O-methyl-adenosine
  modified_base 7: mod_base = OTHER; note = 2'-Fluoro-uridine
  modified_base 8: mod_base = um
  modified_base 9: mod_base = OTHER; note = 2'-Fluoro-uridine
  modified_base 10: mod_base = cm
  modified_base 11: mod_base = OTHER; note = 2'-Fluoro-cytidine
  modified_base 12: mod_base = gm
  modified_base 13: mod_base = OTHER; note = 2'-Fluoro-uridine
  modified_base 14: mod_base = um
  modified_base 15: mod_base = OTHER; note = 2'-Fluoro-guanosine
  modified_base 16: mod_base = cm
  modified_base 17: mod_base = OTHER; note = 2'-Fluoro-adenosine
  modified_base 18: mod_base = OTHER; note = 2'-O-methyl-adenosine
  modified_base 19: mod_base = OTHER; note = 2'-Fluoro-uridine
ggcacatttccgttgcaat

SEQ ID NO: 91 - RNA, 19 nt, synthetic construct
  source 1..19: mol_type = other RNA
  modified_base 1: mod_base = OTHER; note = 2'-Fluoro-adenosine
  modified_base 1^2: mod_base = OTHER; note = Phosphorothioate bond
  modified_base 2: mod_base = um
  modified_base 2^3: mod_base = OTHER; note = Phosphorothioate bond
  modified_base 3: mod_base = OTHER; note = 2'-Fluoro-guanosine
  modified_base 4: mod_base = um
  modified_base 5: mod_base = OTHER; note = 2'-Fluoro-adenosine
  modified_base 6: mod_base = OTHER; note = 2'-O-methyl-adenosine
  modified_base 7: mod_base = OTHER; note = 2'-Fluoro-adenosine
  modified_base 8: mod_base = cm
  modified_base 9: mod_base = OTHER; note = 2'-Fluoro-uridine
  modified_base 10: mod_base = um
  modified_base 11: mod_base = OTHER; note = 2'-Fluoro-guanosine
  modified_base 12: mod_base = OTHER; note = 2'-O-methyl-adenosine
  modified_base 13: mod_base = OTHER; note = 2'-Fluoro-adenosine
  modified_base 14: mod_base = um
  modified_base 15: mod_base = OTHER; note = 2'-Fluoro-uridine
  modified_base 16: mod_base = um
  modified_base 17: mod_base = OTHER; note = 2'-Fluoro-cytidine
  modified_base 18: mod_base = cm
  modified_base 19: mod_base = OTHER; note = 2'-Fluoro-uridine
atgtaaacttgaatttcct

SEQ ID NO: 92 - RNA, 19 nt, synthetic construct
  source 1..19: mol_type = other RNA
  modified_base 1: mod_base = OTHER; note = 2'-Fluoro-adenosine
  modified_base 1^2: mod_base = OTHER; note = Phosphorothioate bond
  modified_base 2: mod_base = um
  modified_base 2^3: mod_base = OTHER; note = Phosphorothioate bond
  modified_base 3: mod_base = OTHER; note = 2'-Fluoro-guanosine
  modified_base 4: mod_base = gm
  modified_base 5: mod_base = OTHER; note = 2'-Fluoro-adenosine
  modified_base 6: mod_base = um
  modified_base 7: mod_base = OTHER; note = 2'-Fluoro-uridine
  modified_base 8: mod_base = um
  modified_base 9: mod_base = OTHER; note = 2'-Fluoro-cytidine
  modified_base 10: mod_base = cm
  modified_base 11: mod_base = OTHER; note = 2'-Fluoro-uridine
  modified_base 12: mod_base = OTHER; note = 2'-O-methyl-adenosine
  modified_base 13: mod_base = OTHER; note = 2'-Fluoro-adenosine
  modified_base 14: mod_base = um
  modified_base 15: mod_base = OTHER; note = 2'-Fluoro-adenosine
  modified_base 16: mod_base = OTHER; note = 2'-O-methyl-adenosine
  modified_base 17: mod_base = OTHER; note = 2'-Fluoro-uridine
  modified_base 18: mod_base = um
  modified_base 19: mod_base = OTHER; note = 2'-Fluoro-adenosine
atggatttcctaataatta

SEQ ID NO: 93 - RNA, 19 nt, synthetic construct
  source 1..19: mol_type = other RNA
  modified_base 1: mod_base = OTHER; note = 2'-Fluoro-uridine
  modified_base 1^2: mod_base = OTHER; note = Phosphorothioate bond
  modified_base 2: mod_base = gm
  modified_base 2^3: mod_base = OTHER; note = Phosphorothioate bond
  modified_base 3: mod_base = OTHER; note = 2'-Fluoro-uridine
  modified_base 4: mod_base = cm
  modified_base 5: mod_base = OTHER; note = 2'-Fluoro-uridine
  modified_base 6: mod_base = cm
  modified_base 7: mod_base = OTHER; note = 2'-Fluoro-uridine
  modified_base 8: mod_base = gm
  modified_base 9: mod_base = OTHER; note = 2'-Fluoro-cytidine
  modified_base 10: mod_base = um
  modified_base 11: mod_base = OTHER; note = 2'-Fluoro-cytidine
  modified_base 12: mod_base = um
  modified_base 13: mod_base = OTHER; note = 2'-Fluoro-adenosine
  modified_base 14: mod_base = OTHER; note = 2'-O-methyl-adenosine
  modified_base 15: mod_base = OTHER; note = 2'-Fluoro-guanosine
  modified_base 16: mod_base = um
  modified_base 17: mod_base = OTHER; note = 2'-Fluoro-adenosine
  modified_base 18: mod_base = OTHER; note = 2'-O-methyl-adenosine
  modified_base 19: mod_base = OTHER; note = 2'-Fluoro-adenosine
tgtctctgctctaagtaaa

SEQ ID NO: 94 - RNA, 19 nt, synthetic construct
  source 1..19: mol_type = other RNA
  modified_base 1: mod_base = OTHER; note = 2'-Fluoro-cytidine
  modified_base 1^2: mod_base = OTHER; note = Phosphorothioate bond
  modified_base 2: mod_base = OTHER; note = 2'-O-methyl-adenosine
  modified_base 2^3: mod_base = OTHER; note = Phosphorothioate bond
  modified_base 3: mod_base = OTHER; note = 2'-Fluoro-adenosine
  modified_base 4: mod_base = OTHER; note = 2'-O-methyl-adenosine
  modified_base 5: mod_base = OTHER; note = 2'-Fluoro-guanosine
  modified_base 6: mod_base = um
  modified_base 7: mod_base = OTHER; note = 2'-Fluoro-guanosine
  modified_base 8: mod_base = cm
  modified_base 9: mod_base = OTHER; note = 2'-Fluoro-cytidine
  modified_base 10: mod_base = um
  modified_base 11: mod_base = OTHER; note = 2'-Fluoro-uridine
  modified_base 12: mod_base = OTHER; note = 2'-O-methyl-adenosine
  modified_base 13: mod_base = OTHER; note = 2'-Fluoro-adenosine
  modified_base 14: mod_base = OTHER; note = 2'-O-methyl-adenosine
  modified_base 15: mod_base = OTHER; note = 2'-Fluoro-adenosine
  modified_base 16: mod_base = gm
  modified_base 17: mod_base = OTHER; note = 2'-Fluoro-adenosine
  modified_base 18: mod_base = OTHER; note = 2'-O-methyl-adenosine
  modified_base 19: mod_base = OTHER; note = 2'-Fluoro-adenosine
caaagtgccttaaaagaaa

SEQ ID NO: 95 - RNA, 19 nt, synthetic construct
  source 1..19: mol_type = other RNA
  modified_base 1: mod_base = OTHER; note = 2'-Fluoro-uridine
  modified_base 1^2: mod_base = OTHER; note = Phosphorothioate bond
  modified_base 2: mod_base = gm
  modified_base 2^3: mod_base = OTHER; note = Phosphorothioate bond
  modified_base 3: mod_base = OTHER; note = 2'-Fluoro-adenosine
  modified_base 4: mod_base = OTHER; note = 2'-O-methyl-adenosine
  modified_base 5: mod_base = OTHER; note = 2'-Fluoro-uridine
  modified_base 6: mod_base = gm
  modified_base 7: mod_base = OTHER; note = 2'-Fluoro-uridine
  modified_base 8: mod_base = gm
  modified_base 9: mod_base = OTHER; note = 2'-Fluoro-cytidine
  modified_base 10: mod_base = cm
  modified_base 11: mod_base = OTHER; note = 2'-Fluoro-uridine
  modified_base 12: mod_base = um
  modified_base 13: mod_base = OTHER; note = 2'-Fluoro-uridine
  modified_base 14: mod_base = um
  modified_base 15: mod_base = OTHER; note = 2'-Fluoro-adenosine
  modified_base 16: mod_base = OTHER; note = 2'-O-methyl-adenosine
  modified_base 17: mod_base = OTHER; note = 2'-Fluoro-uridine
  modified_base 18: mod_base = um
  modified_base 19: mod_base = OTHER; note = 2'-Fluoro-adenosine
tgaatgtgccttttaatta

SEQ ID NO: 96 - RNA, 19 nt, synthetic construct
  source 1..19: mol_type = other RNA
  modified_base 1: mod_base = OTHER; note = 2'-Fluoro-adenosine
  modified_base 1^2: mod_base = OTHER; note = Phosphorothioate bond
  modified_base 2: mod_base = cm
  modified_base 2^3: mod_base = OTHER; note = Phosphorothioate bond
  modified_base 3: mod_base = OTHER; note = 2'-Fluoro-uridine
  modified_base 4: mod_base = um
  modified_base 5: mod_base = OTHER; note = 2'-Fluoro-guanosine
  modified_base 6: mod_base = OTHER; note = 2'-O-methyl-adenosine
  modified_base 7: mod_base = OTHER; note = 2'-Fluoro-adenosine
  modified_base 8: mod_base = um
  modified_base 9: mod_base = OTHER; note = 2'-Fluoro-uridine
  modified_base 10: mod_base = um
  modified_base 11: mod_base = OTHER; note = 2'-Fluoro-cytidine
  modified_base 12: mod_base = cm
  modified_base 13: mod_base = OTHER; note = 2'-Fluoro-uridine
  modified_base 14: mod_base = OTHER; note = 2'-O-methyl-adenosine
  modified_base 15: mod_base = OTHER; note = 2'-Fluoro-uridine
  modified_base 16: mod_base = gm
  modified_base 17: mod_base = OTHER; note = 2'-Fluoro-uridine
  modified_base 18: mod_base = OTHER; note = 2'-O-methyl-adenosine
  modified_base 19: mod_base = OTHER; note = 2'-Fluoro-uridine
acttgaatttcctatgtat

SEQ ID NO: 97 - RNA, 19 nt, synthetic construct
  source 1..19: mol_type = other RNA
  modified_base 1: mod_base = OTHER; note = 2'-Fluoro-cytidine
  modified_base 1^2: mod_base = OTHER; note = Phosphorothioate bond
  modified_base 2: mod_base = um
  modified_base 2^3: mod_base = OTHER; note = Phosphorothioate bond
  modified_base 3: mod_base = OTHER; note = 2'-Fluoro-guanosine
  modified_base 4: mod_base = OTHER; note = 2'-O-methyl-adenosine
  modified_base 5: mod_base = OTHER; note = 2'-Fluoro-cytidine
  modified_base 6: mod_base = um
  modified_base 7: mod_base = OTHER; note = 2'-Fluoro-uridine
  modified_base 8: mod_base = um
  modified_base 9: mod_base = OTHER; note = 2'-Fluoro-uridine
  modified_base 10: mod_base = cm
  modified_base 11: mod_base = OTHER; note = 2'-Fluoro-cytidine
  modified_base 12: mod_base = OTHER; note = 2'-O-methyl-adenosine
  modified_base 13: mod_base = OTHER; note = 2'-Fluoro-adenosine
  modified_base 14: mod_base = OTHER; note = 2'-O-methyl-adenosine
  modified_base 15: mod_base = OTHER; note = 2'-Fluoro-guanosine
  modified_base 16: mod_base = um
  modified_base 17: mod_base = OTHER; note = 2'-Fluoro-guanosine
  modified_base 18: mod_base = cm
  modified_base 19: mod_base = OTHER; note = 2'-Fluoro-cytidine
ctgacttttccaaagtgcc

SEQ ID NO: 98 - RNA, 19 nt, synthetic construct
  source 1..19: mol_type = other RNA
  modified_base 1: mod_base = OTHER; note = 2'-Fluoro-cytidine
  modified_base 1^2: mod_base = OTHER; note = Phosphorothioate bond
  modified_base 2: mod_base = OTHER; note = 2'-O-methyl-adenosine
  modified_base 2^3: mod_base = OTHER; note = Phosphorothioate bond
  modified_base 3: mod_base = OTHER; note = 2'-Fluoro-adenosine
  modified_base 4: mod_base = um
  modified_base 5: mod_base = OTHER; note = 2'-Fluoro-guanosine
  modified_base 6: mod_base = gm
  modified_base 7: mod_base = OTHER; note = 2'-Fluoro-adenosine
  modified_base 8: mod_base = um
  modified_base 9: mod_base = OTHER; note = 2'-Fluoro-uridine
  modified_base 10: mod_base = um
  modified_base 11: mod_base = OTHER; note = 2'-Fluoro-cytidine
  modified_base 12: mod_base = cm
  modified_base 13: mod_base = OTHER; note = 2'-Fluoro-uridine
  modified_base 14: mod_base = OTHER; note = 2'-O-methyl-adenosine
  modified_base 15: mod_base = OTHER; note = 2'-Fluoro-adenosine
  modified_base 16: mod_base = um
  modified_base 17: mod_base = OTHER; note = 2'-Fluoro-adenosine
  modified_base 18: mod_base = OTHER; note = 2'-O-methyl-adenosine
  modified_base 19: mod_base = OTHER; note = 2'-Fluoro-uridine
caatggatttcctaataat

SEQ ID NO: 99 - RNA, 19 nt, synthetic construct
  source 1..19: mol_type = other RNA
  modified_base 1: mod_base = OTHER; note = 2'-Fluoro-uridine
  modified_base 1^2: mod_base = OTHER; note = Phosphorothioate bond
  modified_base 2: mod_base = um
  modified_base 2^3: mod_base = OTHER; note = Phosphorothioate bond
  modified_base 3: mod_base = OTHER; note = 2'-Fluoro-cytidine
  modified_base 4: mod_base = OTHER; note = 2'-O-methyl-adenosine
  modified_base 5: mod_base = OTHER; note = 2'-Fluoro-guanosine
  modified_base 6: mod_base = um
  modified_base 7: mod_base = OTHER; note = 2'-Fluoro-adenosine
  modified_base 8: mod_base = um
  modified_base 9: mod_base = OTHER; note = 2'-Fluoro-uridine
  modified_base 10: mod_base = um
  modified_base 11: mod_base = OTHER; note = 2'-Fluoro-uridine
  modified_base 12: mod_base = gm
  modified_base 13: mod_base = OTHER; note = 2'-Fluoro-guanosine
  modified_base 14: mod_base = OTHER; note = 2'-O-methyl-adenosine
  modified_base 15: mod_base = OTHER; note = 2'-Fluoro-guanosine
  modified_base 16: mod_base = gm
  modified_base 17: mod_base = OTHER; note = 2'-Fluoro-uridine
  modified_base 18: mod_base = gm
  modified_base 19: mod_base = OTHER; note = 2'-Fluoro-uridine
ttcagtattttggaggtgt

SEQ ID NO: 100 - RNA, 19 nt, synthetic construct
  source 1..19: mol_type = other RNA
  modified_base 1: mod_base = OTHER; note = 2'-Fluoro-cytidine
  modified_base 1^2: mod_base = OTHER; note = Phosphorothioate bond
  modified_base 2: mod_base = cm
  modified_base 2^3: mod_base = OTHER; note = Phosphorothioate bond
  modified_base 3: mod_base = OTHER; note = 2'-Fluoro-uridine
  modified_base 4: mod_base = gm
  modified_base 5: mod_base = OTHER; note = 2'-Fluoro-adenosine
  modified_base 6: mod_base = cm
  modified_base 7: mod_base = OTHER; note = 2'-Fluoro-uridine
  modified_base 8: mod_base = um
  modified_base 9: mod_base = OTHER; note = 2'-Fluoro-uridine
  modified_base 10: mod_base = um
  modified_base 11: mod_base = OTHER; note = 2'-Fluoro-cytidine
  modified_base 12: mod_base = cm
  modified_base 13: mod_base = OTHER; note = 2'-Fluoro-adenosine
  modified_base 14: mod_base = OTHER; note = 2'-O-methyl-adenosine
  modified_base 15: mod_base = OTHER; note = 2'-Fluoro-adenosine
  modified_base 16: mod_base = gm
  modified_base 17: mod_base = OTHER; note = 2'-Fluoro-uridine
  modified_base 18: mod_base = gm
  modified_base 19: mod_base = OTHER; note = 2'-Fluoro-cytidine
cctgacttttccaaagtgc

SEQ ID NO: 101 - RNA, 19 nt, synthetic construct
  source 1..19: mol_type = other RNA
  modified_base 1: mod_base = OTHER; note = 2'-Fluoro-guanosine
  modified_base 1^2: mod_base = OTHER; note = Phosphorothioate bond
  modified_base 2: mod_base = gm
  modified_base 2^3: mod_base = OTHER; note = Phosphorothioate bond
  modified_base 3: mod_base = OTHER; note = 2'-Fluoro-adenosine
  modified_base 4: mod_base = um
  modified_base 5: mod_base = OTHER; note = 2'-Fluoro-uridine
  modified_base 6: mod_base = um
  modified_base 7: mod_base = OTHER; note = 2'-Fluoro-cytidine
  modified_base 8: mod_base = cm
  modified_base 9: mod_base = OTHER; note = 2'-Fluoro-uridine
  modified_base 10: mod_base = OTHER; note = 2'-O-methyl-adenosine
  modified_base 11: mod_base = OTHER; note = 2'-Fluoro-adenosine
  modified_base 12: mod_base = um
  modified_base 13: mod_base = OTHER; note = 2'-Fluoro-adenosine
  modified_base 14: mod_base = OTHER; note = 2'-O-methyl-adenosine
  modified_base 15: mod_base = OTHER; note = 2'-Fluoro-uridine
  modified_base 16: mod_base = um
  modified_base 17: mod_base = OTHER; note = 2'-Fluoro-adenosine
  modified_base 18: mod_base = um
  modified_base 19: mod_base = OTHER; note = 2'-Fluoro-uridine
ggatttcctaataattatt

SEQ ID NO: 102 - RNA, 23 nt, Homo sapiens
  source 1..23: mol_type = mRNA
gtaaacttgaatttcctatgtat

SEQ ID NO: 103 - RNA, 23 nt, Homo sapiens
  source 1..23: mol_type = mRNA
gctatgtaaacttgaatttccta

SEQ ID NO: 104 - RNA, 23 nt, Homo sapiens
  source 1..23: mol_type = mRNA
tatgtaaacttgaatttcctatg

SEQ ID NO: 105 - RNA, 23 nt, Homo sapiens
  source 1..23: mol_type = mRNA
aacttgaatttcctatgtatttt

SEQ ID NO: 106 - RNA, 23 nt, Homo sapiens
  source 1..23: mol_type = mRNA
aaacttgaatttcctatgtattt

SEQ ID NO: 107 - RNA, 23 nt, Homo sapiens
  source 1..23: mol_type = mRNA
ctatgtaaacttgaatttcctat

SEQ ID NO: 108 - RNA, 23 nt, Homo sapiens
  source 1..23: mol_type = mRNA
gcatgctatgtaaacttgaattt

SEQ ID NO: 109 - RNA, 23 nt, Homo sapiens
  source 1..23: mol_type = mRNA
tgtctgatttctgaatgtaaagt

SEQ ID NO: 110 - RNA, 23 nt, Homo sapiens
  source 1..23: mol_type = mRNA
tgtaaacttgaatttcctatgta

SEQ ID NO: 111 - RNA, 23 nt, Homo sapiens
  source 1..23: mol_type = mRNA
tcaatggatttcctaataattat

SEQ ID NO: 112 - RNA, 23 nt, Homo sapiens
  source 1..23: mol_type = mRNA
caatggatttcctaataattatt

SEQ ID NO: 113 - RNA, 23 nt, Homo sapiens
  source 1..23: mol_type = mRNA
ggcatgctatgtaaacttgaatt

SEQ ID NO: 114 - RNA, 23 nt, Homo sapiens
  source 1..23: mol_type = mRNA
ttttggaggtgtctctgctctaa

SEQ ID NO: 115 - RNA, 23 nt, Homo sapiens
  source 1..23: mol_type = mRNA
aatcctcagaggtttgaccgaat

SEQ ID NO: 116 - RNA, 23 nt, Homo sapiens
  source 1..23: mol_type = mRNA
atcaatggatttcctaataatta

SEQ ID NO: 117 - RNA, 23 nt, Homo sapiens
  source 1..23: mol_type = mRNA
gacttttccaaagtgccttaaaa

SEQ ID NO: 118 - RNA, 23 nt, Homo sapiens
  source 1..23: mol_type = mRNA
catgctatgtaaacttgaatttc

SEQ ID NO: 119 - RNA, 23 nt, Homo sapiens
  source 1..23: mol_type = mRNA
ccatcaatggatttcctaataat

SEQ ID NO: 120 - RNA, 23 nt, Homo sapiens
  source 1..23: mol_type = mRNA
taaacttgaatttcctatgtatt

SEQ ID NO: 121 - RNA, 23 nt, Homo sapiens
  source 1..23: mol_type = mRNA
tctgctctaagtaaacaacagtt

SEQ ID NO: 122 - RNA, 23 nt, Homo sapiens
  source 1..23: mol_type = mRNA
atgctatgtaaacttgaatttcc

SEQ ID NO: 123 - RNA, 23 nt, Homo sapiens
  source 1..23: mol_type = mRNA
gaggtgtctctgctctaagtaaa

SEQ ID NO: 124 - RNA, 23 nt, Homo sapiens
  source 1..23: mol_type = mRNA
agcatgaatgtgccttttaatta

SEQ ID NO: 125 - RNA, 23 nt, Homo sapiens
  source 1..23: mol_type = mRNA
ggaggtgtctctgctctaagtaa

SEQ ID NO: 126 - RNA, 23 nt, Homo sapiens
  source 1..23: mol_type = mRNA
tttccaaagtgccttaaaagaaa

SEQ ID NO: 127 - RNA, 23 nt, Homo sapiens
  source 1..23: mol_type = mRNA
tgctatgtaaacttgaatttcct

SEQ ID NO: 128 - RNA, 23 nt, Homo sapiens
  source 1..23: mol_type = mRNA
ttcagtattttggaggtgtctct

SEQ ID NO: 129 - RNA, 23 nt, Homo sapiens
  source 1..23: mol_type = mRNA
ccagcatgaatgtgccttttaat

SEQ ID NO: 130 - RNA, 23 nt, Homo sapiens
  source 1..23: mol_type = mRNA
aggtgtctctgctctaagtaaac

SEQ ID NO: 131 - RNA, 23 nt, Homo sapiens
  source 1..23: mol_type = mRNA
ggaggagaagatgatgacatttt

SEQ ID NO: 132 - RNA, 23 nt, Homo sapiens
  source 1..23: mol_type = mRNA
ttggaggtgtctctgctctaagt

SEQ ID NO: 133 - RNA, 23 nt, Homo sapiens
  source 1..23: mol_type = mRNA
ttgtctgatttctgaatgtaaag

SEQ ID NO: 134 - RNA, 23 nt, Homo sapiens
  source 1..23: mol_type = mRNA
ccacggcacatttccgttgcaat

SEQ ID NO: 135 - RNA, 23 nt, Homo sapiens
  source 1..23: mol_type = mRNA
tggatttcctaataattattggg

SEQ ID NO: 136 - RNA, 23 nt, Homo sapiens
  source 1..23: mol_type = mRNA
tgttcagtattttggaggtgtct

SEQ ID NO: 137 - RNA, 23 nt, Homo sapiens
  source 1..23: mol_type = mRNA
catcaatggatttcctaataatt

SEQ ID NO: 138 - RNA, 23 nt, Homo sapiens
  source 1..23: mol_type = mRNA
caatcctcagaggtttgaccgaa

SEQ ID NO: 139 - RNA, 23 nt, Homo sapiens
  source 1..23: mol_type = mRNA
gatggtttgaactcactcaccta

SEQ ID NO: 140 - RNA, 23 nt, Homo sapiens
  source 1..23: mol_type = mRNA
ttttccaaagtgccttaaaagaa

SEQ ID NO: 141 - RNA, 23 nt, Homo sapiens
  source 1..23: mol_type = mRNA
acttttccaaagtgccttaaaag

SEQ ID NO: 142 - RNA, 23 nt, Homo sapiens
  source 1..23: mol_type = mRNA
ggtgtctctgctctaagtaaaca

SEQ ID NO: 143 - RNA, 23 nt, Homo sapiens
  source 1..23: mol_type = mRNA
atcctgacttttccaaagtgcct

SEQ ID NO: 144 - RNA, 23 nt, Homo sapiens
  source 1..23: mol_type = mRNA
gtattttggaggtgtctctgctc

SEQ ID NO: 145 - RNA, 23 nt, Homo sapiens
  source 1..23: mol_type = mRNA
atggtttgaactcactcacctac

SEQ ID NO: 146 - RNA, 23 nt, Homo sapiens
  source 1..23: mol_type = mRNA
attttggaggtgtctctgctcta

SEQ ID NO: 147 - RNA, 23 nt, Homo sapiens
  source 1..23: mol_type = mRNA
tgtctctgctctaagtaaacaac

SEQ ID NO: 148 - RNA, 23 nt, Homo sapiens
  source 1..23: mol_type = mRNA
cggcacatttccgttgcaatgga

SEQ ID NO: 149 - RNA, 23 nt, Homo sapiens
  source 1..23: mol_type = mRNA
gcatgaatgtgccttttaattag

SEQ ID NO: 150 - RNA, 23 nt, Homo sapiens
  source 1..23: mol_type = mRNA
cacggcacatttccgttgcaatg

SEQ ID NO: 151 - RNA, 23 nt, Homo sapiens
  source 1..23: mol_type = mRNA
tatacccaaatcacagtggacat

SEQ ID NO: 152 - RNA, 23 nt, Homo sapiens
  source 1..23: mol_type = mRNA
atcacagtggacatcgggacacc

SEQ ID NO: 153 - RNA, 23 nt, Homo sapiens
  source 1..23: mol_type = mRNA
gtgtctctgctctaagtaaacaa

SEQ ID NO: 154 - RNA, 23 nt, Homo sapiens
  source 1..23: mol_type = mRNA
cagatcctgacttttccaaagtg

SEQ ID NO: 155 - RNA, 23 nt, Homo sapiens
  source 1..23: mol_type = mRNA
cagcatgaatgtgccttttaatt

SEQ ID NO: 156 - RNA, 23 nt, Homo sapiens
  source 1..23: mol_type = mRNA
cttatgttcagtattttggaggt

SEQ ID NO: 157 - RNA, 23 nt, Homo sapiens
  source 1..23: mol_type = mRNA
aatggatttcctaataattattg

SEQ ID NO: 158 - RNA, 23 nt, Homo sapiens
  source 1..23: mol_type = mRNA
tggaggtgtctctgctctaagta

SEQ ID NO: 159 - RNA, 23 nt, Homo sapiens
  source 1..23: mol_type = mRNA
aggtgctggatgtacagagatac

SEQ ID NO: 160 - RNA, 23 nt, Homo sapiens
  source 1..23: mol_type = mRNA
ctgctctaagtaaacaacagttt

SEQ ID NO: 161 - RNA, 23 nt, Homo sapiens
  source 1..23: mol_type = mRNA
tctctgctctaagtaaacaacag

SEQ ID NO: 162 - RNA, 23 nt, Homo sapiens
  source 1..23: mol_type = mRNA
tatgttcagtattttggaggtgt

SEQ ID NO: 163 - RNA, 23 nt, Homo sapiens
  source 1..23: mol_type = mRNA
tattttggaggtgtctctgctct

SEQ ID NO: 164 - RNA, 23 nt, Homo sapiens
  source 1..23: mol_type = mRNA
acccaaatcacagtggacatcgg

SEQ ID NO: 165 - RNA, 23 nt, Homo sapiens
  source 1..23: mol_type = mRNA
ctctgctctaagtaaacaacagt

SEQ ID NO: 166 - RNA, 23 nt, Homo sapiens
  source 1..23: mol_type = mRNA
tttggaggtgtctctgctctaag

SEQ ID NO: 167 - RNA, 23 nt, Homo sapiens
  source 1..23: mol_type = mRNA
cttttccaaagtgccttaaaaga

SEQ ID NO: 168 - RNA, 23 nt, Homo sapiens
  source 1..23: mol_type = mRNA
ggtgctggatgtacagagatacc

SEQ ID NO: 169 - RNA, 23 nt, Homo sapiens
  source 1..23: mol_type = mRNA
gatcctgacttttccaaagtgcc

SEQ ID NO: 170 - RNA, 23 nt, Homo sapiens
  source 1..23: mol_type = mRNA
ctgcgtctctcctcacaaggtgg

SEQ ID NO: 171 - RNA, 23 nt, Homo sapiens
  source 1..23: mol_type = mRNA
atggatttcctaataattattgg

SEQ ID NO: 172 - RNA, 23 nt, Homo sapiens
  source 1..23: mol_type = mRNA
acggcacatttccgttgcaatgg

SEQ ID NO: 173 - RNA, 23 nt, Homo sapiens
  source 1..23: mol_type = mRNA
tgtatacccaaatcacagtggac

SEQ ID NO: 174 - RNA, 23 nt, Homo sapiens
  source 1..23: mol_type = mRNA
gttcagtattttggaggtgtctc

SEQ ID NO: 175 - RNA, 23 nt, Homo sapiens
  source 1..23: mol_type = mRNA
ggctttcaagaagccttgaagga

SEQ ID NO: 176 - RNA, 23 nt, Homo sapiens
  source 1..23: mol_type = mRNA
aattattggggctggggaggaga

SEQ ID NO: 177 - RNA, 23 nt, Homo sapiens
  source 1..23: mol_type = mRNA
ggacatcgggacaccgagctagc

SEQ ID NO: 178 - RNA, 23 nt, Homo sapiens
  source 1..23: mol_type = mRNA
agatcctgacttttccaaagtgc

SEQ ID NO: 179 - RNA, 23 nt, Homo sapiens
  source 1..23: mol_type = mRNA
gtatacccaaatcacagtggaca

SEQ ID NO: 180 - RNA, 23 nt, Homo sapiens
  source 1..23: mol_type = mRNA
ccattccgcaaccggcaggagca

SEQ ID NO: 181 - RNA, 23 nt, Homo sapiens
  source 1..23: mol_type = mRNA
gtgctggatgtacagagataccc

SEQ ID NO: 182 - RNA, 23 nt, Homo sapiens
  source 1..23: mol_type = mRNA
gactgcgtctctcctcacaaggt

SEQ ID NO: 183 - RNA, 23 nt, Homo sapiens
  source 1..23: mol_type = mRNA
caaatcacagtggacatcgggac

SEQ ID NO: 184 - RNA, 23 nt, Homo sapiens
  source 1..23: mol_type = mRNA
gtctctgctctaagtaaacaaca

SEQ ID NO: 185 - RNA, 23 nt, Homo sapiens
  source 1..23: mol_type = mRNA
atgttcagtattttggaggtgtc

SEQ ID NO: 186 - RNA, 23 nt, Homo sapiens
  source 1..23: mol_type = mRNA
attattggggctggggaggagaa

SEQ ID NO: 187 - RNA, 23 nt, Homo sapiens
  source 1..23: mol_type = mRNA
ccttatgttcagtattttggagg

SEQ ID NO: 188 - RNA, 23 nt, Homo sapiens
  source 1..23: mol_type = mRNA
atacccaaatcacagtggacatc

SEQ ID NO: 189 - RNA, 23 nt, Homo sapiens
  source 1..23: mol_type = mRNA
ggatttcctaataattattgggg

SEQ ID NO: 190 - RNA, 23 nt, Homo sapiens
  source 1..23: mol_type = mRNA
tcacagtggacatcgggacaccg

SEQ ID NO: 191 - RNA, 23 nt, Homo sapiens
  source 1..23: mol_type = mRNA
ttgtatacccaaatcacagtgga

SEQ ID NO: 192 - RNA, 23 nt, Homo sapiens
  source 1..23: mol_type = mRNA
attggggctggggaggagaagat

SEQ ID NO: 193 - RNA, 23 nt, Homo sapiens
  source 1..23: mol_type = mRNA
ttatgttcagtattttggaggtg

SEQ ID NO: 194 - RNA, 23 nt, Homo sapiens
  source 1..23: mol_type = mRNA
tggacatcgggacaccgagctag

SEQ ID NO: 195 - RNA, 23 nt, Homo sapiens
  source 1..23: mol_type = mRNA
acagtggacatcgggacaccgag

SEQ ID NO: 196 - RNA, 23 nt, Homo sapiens
  source 1..23: mol_type = mRNA
taattattggggctggggaggag

SEQ ID NO: 197 - RNA, 23 nt, Homo sapiens
  source 1..23: mol_type = mRNA
ttggggctggggaggagaagatg

SEQ ID NO: 198 - RNA, 23 nt, Homo sapiens
  source 1..23: mol_type = mRNA
ggactgcgtctctcctcacaagg

SEQ ID NO: 199 - RNA, 23 nt, Homo sapiens
  source 1..23: mol_type = mRNA
ctaataattattggggctgggga

SEQ ID NO: 200 - RNA, 23 nt, Homo sapiens
  source 1..23: mol_type = mRNA
aatcacagtggacatcgggacac

SEQ ID NO: 201 - RNA, 23 nt, Homo sapiens
  source 1..23: mol_type = mRNA
actgcgtctctcctcacaaggtg

SEQ ID NO: 202 - RNA, 23 nt, synthetic construct
  source 1..23: mol_type = other RNA
atacataggaaattcaagtttac

SEQ ID NO: 203 - RNA, 23 nt, synthetic construct
  source 1..23: mol_type = other RNA
taggaaattcaagtttacatagc

SEQ ID NO: 204 - RNA, 23 nt, synthetic construct
  source 1..23: mol_type = other RNA
cataggaaattcaagtttacata

SEQ ID NO: 205 - RNA, 23 nt, synthetic construct
  source 1..23: mol_type = other RNA
aaaatacataggaaattcaagtt

SEQ ID NO: 206 - RNA, 23 nt, synthetic construct
  source 1..23: mol_type = other RNA
aaatacataggaaattcaagttt

SEQ ID NO: 207 - RNA, 23 nt, synthetic construct
  source 1..23: mol_type = other RNA
ataggaaattcaagtttacatag

SEQ ID NO: 208 - RNA, 23 nt, synthetic construct
  source 1..23: mol_type = other RNA
aaattcaagtttacatagcatgc

SEQ ID NO: 209 - RNA, 23 nt, synthetic construct
  source 1..23: mol_type = other RNA
actttacattcagaaatcagaca

SEQ ID NO: 210 - RNA, 23 nt, synthetic construct
  source 1..23: mol_type = other RNA
tacataggaaattcaagtttaca

SEQ ID NO: 211 - RNA, 23 nt, synthetic construct
  source 1..23: mol_type = other RNA
ataattattaggaaatccattga

SEQ ID NO: 212 - RNA, 23 nt, synthetic construct
  source 1..23: mol_type = other RNA
aataattattaggaaatccattg

SEQ ID NO: 213 - RNA, 23 nt, synthetic construct
  source 1..23: mol_type = other RNA
aattcaagtttacatagcatgcc

SEQ ID NO: 214 - RNA, 23 nt, synthetic construct
  source 1..23: mol_type = other RNA
ttagagcagagacacctccaaaa

SEQ ID NO: 215 - RNA, 23 nt, synthetic construct
  source 1..23: mol_type = other RNA
attcggtcaaacctctgaggatt

SEQ ID NO: 216 - RNA, 23 nt, synthetic construct
  source 1..23: mol_type = other RNA
taattattaggaaatccattgat

SEQ ID NO: 217 - RNA, 23 nt, synthetic construct
  source 1..23: mol_type = other RNA
ttttaaggcactttggaaaagtc

SEQ ID NO: 218 - RNA, 23 nt, synthetic construct
  source 1..23: mol_type = other RNA
gaaattcaagtttacatagcatg

SEQ ID NO: 219 - RNA, 23 nt, synthetic construct
  source 1..23: mol_type = other RNA
attattaggaaatccattgatgg

SEQ ID NO: 220 - RNA, 23 nt, synthetic construct
  source 1..23: mol_type = other RNA
aatacataggaaattcaagttta

SEQ ID NO: 221 - RNA, 23 nt, synthetic construct
  source 1..23: mol_type = other RNA
aactgttgtttacttagagcaga

SEQ ID NO: 222 - RNA, 23 nt, synthetic construct
  source 1..23: mol_type = other RNA
ggaaattcaagtttacatagcat

SEQ ID NO: 223 - RNA, 23 nt, synthetic construct
  source 1..23: mol_type = other RNA
tttacttagagcagagacacctc

SEQ ID NO: 224 - RNA, 23 nt, synthetic construct
  source 1..23: mol_type = other RNA
taattaaaaggcacattcatgct

SEQ ID NO: 225 - RNA, 23 nt, synthetic construct
  source 1..23: mol_type = other RNA
ttacttagagcagagacacctcc

SEQ ID NO: 226 - RNA, 23 nt, synthetic construct
  source 1..23: mol_type = other RNA
tttcttttaaggcactttggaaa

SEQ ID NO: 227 - RNA, 23 nt, synthetic construct
  source 1..23: mol_type = other RNA
aggaaattcaagtttacatagca

SEQ ID NO: 228 - RNA, 23 nt, synthetic construct
  source 1..23: mol_type = other RNA
agagacacctccaaaatactgaa

SEQ ID NO: 229 - RNA, 23 nt, synthetic construct
  source 1..23: mol_type = other RNA
attaaaaggcacattcatgctgg

SEQ ID NO: 230 - RNA, 23 nt, synthetic construct
  source 1..23: mol_type = other RNA
gtttacttagagcagagacacct

SEQ ID NO: 231 - RNA, 23 nt, synthetic construct
  source 1..23: mol_type = other RNA
aaaatgtcatcatcttctcctcc

SEQ ID NO: 232 - RNA, 23 nt, synthetic construct
  source 1..23: mol_type = other RNA
acttagagcagagacacctccaa

SEQ ID NO: 233 - RNA, 23 nt, synthetic construct
  source 1..23: mol_type = other RNA
ctttacattcagaaatcagacaa

SEQ ID NO: 234 - RNA, 23 nt, synthetic construct
  source 1..23: mol_type = other RNA
attgcaacggaaatgtgccgtgg

SEQ ID NO: 235 - RNA, 23 nt, synthetic construct
  source 1..23: mol_type = other RNA
cccaataattattaggaaatcca

SEQ ID NO: 236 - RNA, 23 nt, synthetic construct
  source 1..23: mol_type = other RNA
agacacctccaaaatactgaaca

SEQ ID NO: 237 - RNA, 23 nt, synthetic construct
  source 1..23: mol_type = other RNA
aattattaggaaatccattgatg

SEQ ID NO: 238 - RNA, 23 nt, synthetic construct
  source 1..23: mol_type = other RNA
ttcggtcaaacctctgaggattg

SEQ ID NO: 239 - RNA, 23 nt, synthetic construct
  source 1..23: mol_type = other RNA
taggtgagtgagttcaaaccatc

SEQ ID NO: 240 - RNA, 23 nt, synthetic construct
  source 1..23: mol_type = other RNA
ttcttttaaggcactttggaaaa

SEQ ID NO: 241 - RNA, 23 nt, synthetic construct
  source 1..23: mol_type = other RNA
cttttaaggcactttggaaaagt

SEQ ID NO: 242 - RNA, 23 nt, synthetic construct
  source 1..23: mol_type = other RNA
tgtttacttagagcagagacacc

SEQ ID NO: 243 - RNA, 23 nt, synthetic construct
  source 1..23: mol_type = other RNA
aggcactttggaaaagtcaggat

SEQ ID NO: 244 - RNA, 23 nt, synthetic construct
  source 1..23: mol_type = other RNA
gagcagagacacctccaaaatac

SEQ ID NO: 245 - RNA, 23 nt, synthetic construct
  source 1..23: mol_type = other RNA
gtaggtgagtgagttcaaaccat

SEQ ID NO: 246 - RNA, 23 nt, synthetic construct
  source 1..23: mol_type = other RNA
tagagcagagacacctccaaaat

SEQ ID NO: 247 - RNA, 23 nt, synthetic construct
  source 1..23: mol_type = other RNA
gttgtttacttagagcagagaca

SEQ ID NO: 248 - RNA, 23 nt, synthetic construct
  source 1..23: mol_type = other RNA
tccattgcaacggaaatgtgccg

SEQ ID NO: 249 - RNA, 23 nt, synthetic construct
  source 1..23: mol_type = other RNA
ctaattaaaaggcacattcatgc

SEQ ID NO: 250 - RNA, 23 nt, synthetic construct
  source 1..23: mol_type = other RNA
cattgcaacggaaatgtgccgtg

SEQ ID NO: 251 - RNA, 23 nt, synthetic construct
  source 1..23: mol_type = other RNA
atgtccactgtgatttgggtata

SEQ ID NO: 252 - RNA, 23 nt, synthetic construct
  source 1..23: mol_type = other RNA
ggtgtcccgatgtccactgtgat

SEQ ID NO: 253 - RNA, 23 nt, synthetic construct
  source 1..23: mol_type = other RNA
ttgtttacttagagcagagacac

SEQ ID NO: 254 - RNA, 23 nt, synthetic construct
  source 1..23: mol_type = other RNA
cactttggaaaagtcaggatctg

SEQ ID NO: 255 - RNA, 23 nt, synthetic construct
  source 1..23: mol_type = other RNA
aattaaaaggcacattcatgctg

SEQ ID NO: 256 - RNA, 23 nt, synthetic construct
  source 1..23: mol_type = other RNA
acctccaaaatactgaacataag

SEQ ID NO: 257 - RNA, 23 nt, synthetic construct
  source 1..23: mol_type = other RNA
caataattattaggaaatccatt

SEQ ID NO: 258 - RNA, 23 nt, synthetic construct
  source 1..23: mol_type = other RNA
tacttagagcagagacacctcca

SEQ ID NO: 259 - RNA, 23 nt, synthetic construct
  source 1..23: mol_type = other RNA
gtatctctgtacatccagcacct

SEQ ID NO: 260 - RNA, 23 nt, synthetic construct
  source 1..23: mol_type = other RNA
aaactgttgtttacttagagcag

SEQ ID NO: 261 - RNA, 23 nt, synthetic construct
  source 1..23: mol_type = other RNA
ctgttgtttacttagagcagaga

SEQ ID NO: 262 - RNA, 23 nt, synthetic construct
  source 1..23: mol_type = other RNA
acacctccaaaatactgaacata

SEQ ID NO: 263 - RNA, 23 nt, synthetic construct
  source 1..23: mol_type = other RNA
agagcagagacacctccaaaata

SEQ ID NO: 264 - RNA, 23 nt, synthetic construct
  source 1..23: mol_type = other RNA
ccgatgtccactgtgatttgggt

SEQ ID NO: 265 - RNA, 23 nt, synthetic construct
  source 1..23: mol_type = other RNA
actgttgtttacttagagcagag

SEQ ID NO: 266 - RNA, 23 nt, synthetic construct
  source 1..23: mol_type = other RNA
cttagagcagagacacctccaaa

SEQ ID NO: 267 - RNA, 23 nt, synthetic construct
  source 1..23: mol_type = other RNA
tcttttaaggcactttggaaaag

SEQ ID NO: 268 - RNA, 23 nt, synthetic construct
  source 1..23: mol_type = other RNA
ggtatctctgtacatccagcacc

SEQ ID NO: 269 - RNA, 23 nt, synthetic construct
  source 1..23: mol_type = other RNA
ggcactttggaaaagtcaggatc

SEQ ID NO: 270 - RNA, 23 nt, synthetic construct
  source 1..23: mol_type = other RNA
ccaccttgtgaggagagacgcag

SEQ ID NO: 271 - RNA, 23 nt, synthetic construct
  source 1..23: mol_type = other RNA
ccaataattattaggaaatccat

SEQ ID NO: 272 - RNA, 23 nt, synthetic construct
  source 1..23: mol_type = other RNA
ccattgcaacggaaatgtgccgt

SEQ ID NO: 273 - RNA, 23 nt, synthetic construct
  source 1..23: mol_type = other RNA
gtccactgtgatttgggtataca

SEQ ID NO: 274 - RNA, 23 nt, synthetic construct
  source 1..23: mol_type = other RNA
gagacacctccaaaatactgaac

SEQ ID NO: 275 - RNA, 23 nt, synthetic construct
  source 1..23: mol_type = other RNA
tccttcaaggcttcttgaaagcc

SEQ ID NO: 276 - RNA, 23 nt, synthetic construct
  source 1..23: mol_type = other RNA
tctcctccccagccccaataatt

SEQ ID NO: 277 - RNA, 23 nt, synthetic construct
  source 1..23: mol_type = other RNA
gctagctcggtgtcccgatgtcc

SEQ ID NO: 278 - RNA, 23 nt, synthetic construct
  source 1..23: mol_type = other RNA
gcactttggaaaagtcaggatct

SEQ ID NO: 279 - RNA, 23 nt, synthetic construct
  source 1..23: mol_type = other RNA
tgtccactgtgatttgggtatac

SEQ ID NO: 280 - RNA, 23 nt, synthetic construct
  source 1..23: mol_type = other RNA
tgctcctgccggttgcggaatgg

SEQ ID NO: 281 - RNA, 23 nt, synthetic construct
  source 1..23: mol_type = other RNA
gggtatctctgtacatccagcac

SEQ ID NO: 282 - RNA, 23 nt, synthetic construct
  source 1..23: mol_type = other RNA
accttgtgaggagagacgcagtc

SEQ ID NO: 283 - RNA, 23 nt, synthetic construct
  source 1..23: mol_type = other RNA
gtcccgatgtccactgtgatttg

SEQ ID NO: 284 - RNA, 23 nt, synthetic construct
  source 1..23: mol_type = other RNA
tgttgtttacttagagcagagac

SEQ ID NO: 285 - RNA, 23 nt, synthetic construct
  source 1..23: mol_type = other RNA
gacacctccaaaatactgaacat

SEQ ID NO: 286 - RNA, 23 nt, synthetic construct
  source 1..23: mol_type = other RNA
ttctcctccccagccccaataat

SEQ ID NO: 287 - RNA, 23 nt, synthetic construct
  source 1..23: mol_type = other RNA
cctccaaaatactgaacataagg

SEQ ID NO: 288 - RNA, 23 nt, synthetic construct
  source 1..23: mol_type = other RNA
gatgtccactgtgatttgggtat

SEQ ID NO: 289 - RNA, 23 nt, synthetic construct
  source 1..23: mol_type = other RNA
ccccaataattattaggaaatcc

SEQ ID NO: 290 - RNA, 23 nt, synthetic construct
  source 1..23: mol_type = other RNA
cggtgtcccgatgtccactgtga

SEQ ID NO: 291 - RNA, 23 nt, synthetic construct
  source 1..23: mol_type = other RNA
tccactgtgatttgggtatacaa

SEQ ID NO: 292 - RNA, 23 nt, synthetic construct
  source 1..23: mol_type = other RNA
atcttctcctccccagccccaat

SEQ ID NO: 293 - RNA, 23 nt, synthetic construct
  source 1..23: mol_type = other RNA
cacctccaaaatactgaacataa

SEQ ID NO: 294 - RNA, 23 nt, synthetic construct
  source 1..23: mol_type = other RNA
ctagctcggtgtcccgatgtcca

SEQ ID NO: 295 - RNA, 23 nt, synthetic construct
  source 1..23: mol_type = other RNA
ctcggtgtcccgatgtccactgt

SEQ ID NO: 296 - RNA, 23 nt, synthetic construct
  source 1..23: mol_type = other RNA
ctcctccccagccccaataatta

SEQ ID NO: 297 - RNA, 23 nt, synthetic construct
  source 1..23: mol_type = other RNA
catcttctcctccccagccccaa

SEQ ID NO: 298 - RNA, 23 nt, synthetic construct
  source 1..23: mol_type = other RNA
ccttgtgaggagagacgcagtcc

SEQ ID NO: 299 - RNA, 23 nt, synthetic construct
  source 1..23: mol_type = other RNA
tccccagccccaataattattag

SEQ ID NO: 300 - RNA, 23 nt, synthetic construct
  source 1..23: mol_type = other RNA
gtgtcccgatgtccactgtgatt

SEQ ID NO: 301 - RNA, 23 nt, synthetic construct
  source 1..23: mol_type = other RNA
caccttgtgaggagagacgcagt

SEQ ID NO: 302 - RNA, 21 nt, synthetic construct
  source 1..21: mol_type = other RNA
aaacttgaatttcctatgtat

SEQ ID NO: 303 - RNA, 21 nt, synthetic construct
  source 1..21: mol_type = other RNA
tatgtaaacttgaatttccta

SEQ ID NO: 304 - RNA, 21 nt, synthetic construct
  source 1..21: mol_type = other RNA
tgtaaacttgaatttcctatg

SEQ ID NO: 305 - RNA, 21 nt, synthetic construct
  source 1..21: mol_type = other RNA
cttgaatttcctatgtatttt

SEQ ID NO: 306 - RNA, 21 nt, synthetic construct
  source 1..21: mol_type = other RNA
acttgaatttcctatgtattt

SEQ ID NO: 307 - RNA, 21 nt, synthetic construct
  source 1..21: mol_type = other RNA
atgtaaacttgaatttcctat

SEQ ID NO: 308 - RNA, 21 nt, synthetic construct
  source 1..21: mol_type = other RNA
atgctatgtaaacttgaattt

SEQ ID NO: 309 - RNA, 21 nt, synthetic construct
  source 1..21: mol_type = other RNA
tctgatttctgaatgtaaagt

SEQ ID NO: 310 - RNA, 21 nt, synthetic construct
  source 1..21: mol_type = other RNA
taaacttgaatttcctatgta

SEQ ID NO: 311 - RNA, 21 nt, synthetic construct
  source 1..21: mol_type = other RNA
aatggatttcctaataattat

SEQ ID NO: 312 - RNA, 21 nt, synthetic construct
  source 1..21: mol_type = other RNA
atggatttcctaataattatt

SEQ ID NO: 313 - RNA, 21 nt, synthetic construct
  source 1..21: mol_type = other RNA
catgctatgtaaacttgaatt

SEQ ID NO: 314 - RNA, 21 nt, synthetic construct
  source 1..21: mol_type = other RNA
ttggaggtgtctctgctctaa

SEQ ID NO: 315 - RNA, 21 nt, synthetic construct
  source 1..21: mol_type = other RNA
tcctcagaggtttgaccgaat

SEQ ID NO: 316 - RNA, 21 nt, synthetic construct
  source 1..21: mol_type = other RNA
caatggatttcctaataatta

SEQ ID NO: 317 - RNA, 21 nt, synthetic construct
  source 1..21: mol_type = other RNA
cttttccaaagtgccttaaaa

SEQ ID NO: 318 - RNA, 21 nt, synthetic construct
  source 1..21: mol_type = other RNA
tgctatgtaaacttgaatttc

SEQ ID NO: 319 - RNA, 21 nt, synthetic construct
  source 1..21: mol_type = other RNA
atcaatggatttcctaataat

SEQ ID NO: 320 - RNA, 21 nt, synthetic construct
  source 1..21: mol_type = other RNA
aacttgaatttcctatgtatt

SEQ ID NO: 321 - RNA, 21 nt, synthetic construct
  source 1..21: mol_type = other RNA
tgctctaagtaaacaacagtt

SEQ ID NO: 322 - RNA, 21 nt, synthetic construct
  source 1..21: mol_type = other RNA
gctatgtaaacttgaatttcc

SEQ ID NO: 323 - RNA, 21 nt, synthetic construct
  source 1..21: mol_type = other RNA
ggtgtctctgctctaagtaaa

SEQ ID NO: 324 - RNA, 21 nt, synthetic construct
  source 1..21: mol_type = other RNA
catgaatgtgccttttaatta

SEQ ID NO: 325 - RNA, 21 nt, synthetic construct
  source 1..21: mol_type = other RNA
aggtgtctctgctctaagtaa

SEQ ID NO: 326 - RNA, 21 nt, synthetic construct
  source 1..21: mol_type = other RNA
tccaaagtgccttaaaagaaa

SEQ ID NO: 327 - RNA, 21 nt, synthetic construct
  source 1..21: mol_type = other RNA
ctatgtaaacttgaatttcct

SEQ ID NO: 328 - RNA, 21 nt, synthetic construct
  source 1..21: mol_type = other RNA
cagtattttggaggtgtctct

SEQ ID NO: 329 - RNA, 21 nt, synthetic construct
  source 1..21: mol_type = other RNA
agcatgaatgtgccttttaat

SEQ ID NO: 330 - RNA, 21 nt, synthetic construct
  source 1..21: mol_type = other RNA
gtgtctctgctctaagtaaac

SEQ ID NO: 331 - RNA, 21 nt, synthetic construct
  source 1..21: mol_type = other RNA
aggagaagatgatgacatttt

SEQ ID NO: 332 - RNA, 21 nt, synthetic construct
  source 1..21: mol_type = other RNA
ggaggtgtctctgctctaagt

SEQ ID NO: 333 - RNA, 21 nt, synthetic construct
  source 1..21: mol_type = other RNA
gtctgatttctgaatgtaaag

SEQ ID NO: 334 - RNA, 21 nt, synthetic construct
  source 1..21: mol_type = other RNA
acggcacatttccgttgcaat

SEQ ID NO: 335 - RNA, 21 nt, synthetic construct
  source 1..21: mol_type = other RNA
gatttcctaataattattggg

SEQ ID NO: 336 - RNA, 21 nt, synthetic construct
  source 1..21: mol_type = other RNA
ttcagtattttggaggtgtct

SEQ ID NO: 337 - RNA, 21 nt, synthetic construct
  source 1..21: mol_type = other RNA
tcaatggatttcctaataatt

SEQ ID NO: 338 - RNA, 21 nt, synthetic construct
  source 1..21: mol_type = other RNA
atcctcagaggtttgaccgaa

SEQ ID NO: 339 - RNA, 21 nt, synthetic construct
  source 1..21: mol_type = other RNA
tggtttgaactcactcaccta

SEQ ID NO: 340 - RNA, 21 nt, synthetic construct
  source 1..21: mol_type = other RNA
ttccaaagtgccttaaaagaa

SEQ ID NO: 341 - RNA, 21 nt, synthetic construct
  source 1..21: mol_type = other RNA
ttttccaaagtgccttaaaag

SEQ ID NO: 342 - RNA, 21 nt, synthetic construct
  source 1..21: mol_type = other RNA
tgtctctgctctaagtaaaca

SEQ ID NO: 343 - RNA, 21 nt, synthetic construct
  source 1..21: mol_type = other RNA
cctgacttttccaaagtgcct

SEQ ID NO: 344 - RNA, 21 nt, synthetic construct
  source 1..21: mol_type = other RNA
attttggaggtgtctctgctc

SEQ ID NO: 345 - RNA, 21 nt, synthetic construct
  source 1..21: mol_type = other RNA
ggtttgaactcactcacctac

SEQ ID NO: 346 - RNA, 21 nt, synthetic construct
  source 1..21: mol_type = other RNA
tttggaggtgtctctgctcta

SEQ ID NO: 347 - RNA, 21 nt, synthetic construct
  source 1..21: mol_type = other RNA
tctctgctctaagtaaacaac

SEQ ID NO: 348 - RNA, 21 nt, synthetic construct
  source 1..21: mol_type = other RNA
gcacatttccgttgcaatgga

SEQ ID NO: 349 - RNA, 21 nt, synthetic construct
  source 1..21: mol_type = other RNA
atgaatgtgccttttaattag

SEQ ID NO: 350 - RNA, 21 nt, synthetic construct
  source 1..21: mol_type = other RNA
cggcacatttccgttgcaatg

SEQ ID NO: 351 - RNA, 21 nt, synthetic construct
  source 1..21: mol_type = other RNA
tacccaaatcacagtggacat

SEQ ID NO: 352 - RNA, 21 nt, synthetic construct
  source 1..21: mol_type = other RNA
cacagtggacatcgggacacc

SEQ ID NO: 353 - RNA, 21 nt, synthetic construct
  source 1..21: mol_type = other RNA
gtctctgctctaagtaaacaa

SEQ ID NO: 354 - RNA, 21 nt, synthetic construct
  source 1..21: mol_type = other RNA
gatcctgacttttccaaagtg

SEQ ID NO: 355 - RNA, 21 nt, synthetic construct
  source 1..21: mol_type = other RNA
gcatgaatgtgccttttaatt

SEQ ID NO: 356 - RNA, 21 nt, synthetic construct
  source 1..21: mol_type = other RNA
tatgttcagtattttggaggt

SEQ ID NO: 357 - RNA, 21 nt, synthetic construct
  source 1..21: mol_type = other RNA
tggatttcctaataattattg

SEQ ID NO: 358 - RNA, 21 nt, synthetic construct
  source 1..21: mol_type = other RNA
gaggtgtctctgctctaagta

SEQ ID NO: 359 - RNA, 21 nt, synthetic construct
  source 1..21: mol_type = other RNA
gtgctggatgtacagagatac

SEQ ID NO: 360 - RNA, 21 nt, synthetic construct
  source 1..21: mol_type = other RNA
gctctaagtaaacaacagttt

SEQ ID NO: 361 - RNA, 21 nt, synthetic construct
  source 1..21: mol_type = other RNA
tctgctctaagtaaacaacag

SEQ ID NO: 362 - RNA, 21 nt, synthetic construct
  source 1..21: mol_type = other RNA
tgttcagtattttggaggtgt

SEQ ID NO: 363 - RNA, 21 nt, synthetic construct
  source 1..21: mol_type = other RNA
ttttggaggtgtctctgctct

SEQ ID NO: 364 - RNA, 21 nt, synthetic construct
  source 1..21: mol_type = other RNA
ccaaatcacagtggacatcgg

SEQ ID NO: 365 - RNA, 21 nt, synthetic construct
  source 1..21: mol_type = other RNA
ctgctctaagtaaacaacagt

SEQ ID NO: 366 - RNA, 21 nt, synthetic construct
  source 1..21: mol_type = other RNA
tggaggtgtctctgctctaag

SEQ ID NO: 367 - RNA, 21 nt, synthetic construct
  source 1..21: mol_type = other RNA
tttccaaagtgccttaaaaga

SEQ ID NO: 368 - RNA, 21 nt, synthetic construct
  source 1..21: mol_type = other RNA
tgctggatgtacagagatacc

SEQ ID NO: 369 - RNA, 21 nt, synthetic construct
  source 1..21: mol_type = other RNA
tcctgacttttccaaagtgcc

SEQ ID NO: 370 - RNA, 21 nt, synthetic construct
  source 1..21: mol_type = other RNA
gcgtctctcctcacaaggtgg

SEQ ID NO: 371 - RNA, 21 nt, synthetic construct
  source 1..21: mol_type = other RNA
ggatttcctaataattattgg

SEQ ID NO: 372 - RNA, 21 nt, synthetic construct
  source 1..21: mol_type = other RNA
ggcacatttccgttgcaatgg

SEQ ID NO: 373 - RNA, 21 nt, synthetic construct
  source 1..21: mol_type = other RNA
tatacccaaatcacagtggac

SEQ ID NO: 374 - RNA, 21 nt, synthetic construct
  source 1..21: mol_type = other RNA
tcagtattttggaggtgtctc

SEQ ID NO: 375 - RNA, 21 nt, synthetic construct
  source 1..21: mol_type = other RNA
ctttcaagaagccttgaagga

SEQ ID NO: 376 - RNA, 21 nt, synthetic construct
  source 1..21: mol_type = other RNA
ttattggggctggggaggaga

SEQ ID NO: 377 - RNA, 21 nt, synthetic construct
  source 1..21: mol_type = other RNA
acatcgggacaccgagctagc

SEQ ID NO: 378 - RNA, 21 nt, synthetic construct
  source 1..21: mol_type = other RNA
atcctgacttttccaaagtgc

SEQ ID NO: 379 - RNA, 21 nt, synthetic construct
  source 1..21: mol_type = other RNA
atacccaaatcacagtggaca

SEQ ID NO: 380 - RNA, 21 nt, synthetic construct
  source 1..21: mol_type = other RNA
attccgcaaccggcaggagca

SEQ ID NO: 381 - RNA, 21 nt, synthetic construct
  source 1..21: mol_type = other RNA
gctggatgtacagagataccc

SEQ ID NO: 382 - RNA, 21 nt, synthetic construct
  source 1..21: mol_type = other RNA
ctgcgtctctcctcacaaggt

SEQ ID NO: 383 - RNA, 21 nt, synthetic construct
  source 1..21: mol_type = other RNA
aatcacagtggacatcgggac

SEQ ID NO: 384 - RNA, 21 nt, synthetic construct
  source 1..21: mol_type = other RNA
ctctgctctaagtaaacaaca

SEQ ID NO: 385 - RNA, 21 nt, synthetic construct
  source 1..21: mol_type = other RNA
gttcagtattttggaggtgtc

SEQ ID NO: 386 - RNA, 21 nt, synthetic construct
  source 1..21: mol_type = other RNA
tattggggctggggaggagaa

SEQ ID NO: 387 - RNA, 21 nt, synthetic construct
  source 1..21: mol_type = other RNA
ttatgttcagtattttggagg

SEQ ID NO: 388 - RNA, 21 nt, synthetic construct
  source 1..21: mol_type = other RNA
acccaaatcacagtggacatc

SEQ ID NO: 389 - RNA, 21 nt, synthetic construct
  source 1..21: mol_type = other RNA
atttcctaataattattgggg

SEQ ID NO: 390 - RNA, 21 nt, synthetic construct
  source 1..21: mol_type = other RNA
acagtggacatcgggacaccg

SEQ ID NO: 391 - RNA, 21 nt, synthetic construct
  source 1..21: mol_type = other RNA
gtatacccaaatcacagtgga

SEQ ID NO: 392 - RNA, 21 nt, synthetic construct
  source 1..21: mol_type = other RNA
tggggctggggaggagaagat

SEQ ID NO: 393 - RNA, 21 nt, synthetic construct
  source 1..21: mol_type = other RNA
atgttcagtattttggaggtg

SEQ ID NO: 394 - RNA, 21 nt, synthetic construct
  source 1..21: mol_type = other RNA
gacatcgggacaccgagctag

SEQ ID NO: 395 - RNA, 21 nt, synthetic construct
  source 1..21: mol_type = other RNA
agtggacatcgggacaccgag

SEQ ID NO: 396 - RNA, 21 nt, synthetic construct
  source 1..21: mol_type = other RNA
attattggggctggggaggag

SEQ ID NO: 397 - RNA, 21 nt, synthetic construct
  source 1..21: mol_type = other RNA
ggggctggggaggagaagatg

SEQ ID NO: 398 - RNA, 21 nt, synthetic construct
  source 1..21: mol_type = other RNA
actgcgtctctcctcacaagg

SEQ ID NO: 399 - RNA, 21 nt, synthetic construct
  source 1..21: mol_type = other RNA
aataattattggggctgggga

SEQ ID NO: 400 - RNA, 21 nt, synthetic construct
  source 1..21: mol_type = other RNA
tcacagtggacatcgggacac

SEQ ID NO: 401 - RNA, 21 nt, synthetic construct
  source 1..21: mol_type = other RNA
tgcgtctctcctcacaaggtg

SEQ ID NO: 402 - RNA, 23 nt, synthetic construct
  source 1..23: mol_type = other RNA
  modified_base 1: mod_base = OTHER; note = 2'-O-methyl-adenosine
  modified_base 1^2: mod_base = OTHER; note = Phosphorothioate bond
  modified_base 2: mod_base = OTHER; note = 2'-Fluoro-adenosine
  modified_base 2^3: mod_base = OTHER; note = Phosphorothioate bond
  modified_base 3: mod_base = um
  modified_base 4: mod_base = OTHER; note = 2'-O-methyl-adenosine
  modified_base 5: mod_base = cm
  modified_base 6: mod_base = OTHER; note = 2'-Fluoro-adenosine
  modified_base 7: mod_base = um
  modified_base 8: mod_base = OTHER; note = 2'-Fluoro-adenosine
  modified_base 9: mod_base = OTHER; note = 2'-Fluoro-guanosine
  modified_base 10: mod_base = gm
  modified_base 11: mod_base = OTHER; note = 2'-O-methyl-adenosine
  modified_base 12: mod_base = OTHER; note = 2'-O-methyl-adenosine
  modified_base 13: mod_base = OTHER; note = 2'-O-methyl-adenosine
  modified_base 14: mod_base = OTHER; note = 2'-Fluoro-uridine
  modified_base 15: mod_base = um
  modified_base 16: mod_base = OTHER; note = 2'-Fluoro-cytidine
  modified_base 17: mod_base = OTHER; note = 2'-O-methyl-adenosine
  modified_base 18: mod_base = OTHER; note = 2'-O-methyl-adenosine
  modified_base 19: mod_base = gm
  modified_base 20: mod_base = um
  modified_base 21: mod_base = um
  modified_base 21^22: mod_base = OTHER; note = Phosphorothioate bond
  modified_base 22: mod_base = um
  modified_base 22^23: mod_base = OTHER; note = Phosphorothioate bond
  modified_base 23: mod_base = OTHER; note = 2'-O-methyl-adenosine
aatacataggaaattcaagttta

SEQ ID NO: 403 - RNA, 23 nt, synthetic construct
  source 1..23: mol_type = other RNA
  modified_base 1: mod_base = OTHER; note = 2'-O-methyl-adenosine
  modified_base 1^2: mod_base = OTHER; note = Phosphorothioate bond
  modified_base 2: mod_base = OTHER; note = 2'-Fluoro-adenosine
  modified_base 2^3: mod_base = OTHER; note = Phosphorothioate bond
  modified_base 3: mod_base = um
  modified_base 4: mod_base = um
  modified_base 5: mod_base = OTHER; note = 2'-O-methyl-adenosine
  modified_base 6: mod_base = OTHER; note = 2'-Fluoro-uridine
  modified_base 7: mod_base = um
  modified_base 8: mod_base = OTHER; note = 2'-Fluoro-adenosine
  modified_base 9: mod_base = OTHER; note = 2'-Fluoro-guanosine
  modified_base 10: mod_base = gm
  modified_base 11: mod_base = OTHER; note = 2'-O-methyl-adenosine
  modified_base 12: mod_base = OTHER; note = 2'-O-methyl-adenosine
  modified_base 13: mod_base = OTHER; note = 2'-O-methyl-adenosine
  modified_base 14: mod_base = OTHER; note = 2'-Fluoro-uridine
  modified_base 15: mod_base = cm
  modified_base 16: mod_base = OTHER; note = 2'-Fluoro-cytidine
  modified_base 17: mod_base = OTHER; note = 2'-O-methyl-adenosine
  modified_base 18: mod_base = um
  modified_base 19: mod_base = um
  modified_base 20: mod_base = gm
  modified_base 21: mod_base = OTHER; note = 2'-O-methyl-adenosine
  modified_base 21^22: mod_base = OTHER; note = Phosphorothioate bond
  modified_base 22: mod_base = um
  modified_base 22^23: mod_base = OTHER; note = Phosphorothioate bond
  modified_base 23: mod_base = gm
aattattaggaaatccattgatg

SEQ ID NO: 404 - RNA, 23 nt, synthetic construct
  source 1..23: mol_type = other RNA
  modified_base 1: mod_base = gm
  modified_base 1^2: mod_base = OTHER; note = Phosphorothioate bond
  modified_base 2: mod_base = OTHER; note = 2'-Fluoro-adenosine
  modified_base 2^3: mod_base = OTHER; note = Phosphorothioate bond
  modified_base 3: mod_base = cm
  modified_base 4: mod_base = OTHER; note = 2'-O-methyl-adenosine
  modified_base 5: mod_base = cm
  modified_base 6: mod_base = OTHER; note = 2'-Fluoro-cytidine
  modified_base 7: mod_base = um
  modified_base 8: mod_base = OTHER; note = 2'-Fluoro-cytidine
  modified_base 9: mod_base = OTHER; note = 2'-Fluoro-cytidine
  modified_base 10: mod_base = OTHER; note = 2'-O-methyl-adenosine
  modified_base 11: mod_base = OTHER; note = 2'-O-methyl-adenosine
  modified_base 12: mod_base = OTHER; note = 2'-O-methyl-adenosine
  modified_base 13: mod_base = OTHER; note = 2'-O-methyl-adenosine
  modified_base 14: mod_base = OTHER; note = 2'-Fluoro-uridine
  modified_base 15: mod_base = OTHER; note = 2'-O-methyl-adenosine
  modified_base 16: mod_base = OTHER; note = 2'-Fluoro-cytidine
  modified_base 17: mod_base = um
  modified_base 18: mod_base = gm
  modified_base 19: mod_base = OTHER; note = 2'-O-methyl-adenosine
  modified_base 20: mod_base = OTHER; note = 2'-O-methyl-adenosine
  modified_base 21: mod_base = cm
  modified_base 21^22: mod_base = OTHER; note = Phosphorothioate bond
  modified_base 22: mod_base = OTHER; note = 2'-O-methyl-adenosine
  modified_base 22^23: mod_base = OTHER; note = Phosphorothioate bond
  modified_base 23: mod_base = um
gacacctccaaaatactgaacat

SEQ ID NO: 405 - RNA, 23 nt, synthetic construct
  source 1..23: mol_type = other RNA
  modified_base 1: mod_base = OTHER; note = 2'-O-methyl-adenosine
  modified_base 1^2: mod_base = OTHER; note = Phosphorothioate bond
  modified_base 2: mod_base = OTHER; note = 2'-Fluoro-uridine
  modified_base 2^3: mod_base = OTHER; note = Phosphorothioate bond
  modified_base 3: mod_base = OTHER; note = 2'-O-methyl-adenosine
  modified_base 4: mod_base = OTHER; note = 2'-O-methyl-adenosine
  modified_base 5: mod_base = um
  modified_base 6: mod_base = OTHER; note = 2'-Fluoro-uridine
  modified_base 7: mod_base = OTHER; note = 2'-O-methyl-adenosine
  modified_base 8: mod_base = OTHER; note = 2'-Fluoro-uridine
  modified_base 9: mod_base = OTHER; note = 2'-Fluoro-uridine
  modified_base 10: mod_base = OTHER; note = 2'-O-methyl-adenosine
  modified_base 11: mod_base = gm
  modified_base 12: mod_base = gm
  modified_base 13: mod_base = OTHER; note = 2'-O-methyl-adenosine
  modified_base 14: mod_base = OTHER; note = 2'-Fluoro-adenosine
  modified_base 15: mod_base = OTHER; note = 2'-O-methyl-adenosine
  modified_base 16: mod_base = OTHER; note = 2'-Fluoro-uridine
  modified_base 17: mod_base = cm
  modified_base 18: mod_base = cm
  modified_base 19: mod_base = OTHER; note = 2'-O-methyl-adenosine
  modified_base 20: mod_base = um
  modified_base 21: mod_base = um
  modified_base 21^22: mod_base = OTHER; note = Phosphorothioate bond
  modified_base 22: mod_base = gm
  modified_base 22^23: mod_base = OTHER; note = Phosphorothioate bond
  modified_base 23: mod_base = OTHER; note = 2'-O-methyl-adenosine
ataattattaggaaatccattga

SEQ ID NO: 406 - RNA, 23 nt, synthetic construct
  source 1..23: mol_type = other RNA
  modified_base 1: mod_base = OTHER; note = 2'-O-methyl-adenosine
  modified_base 1^2: mod_base = OTHER; note = Phosphorothioate bond
  modified_base 2: mod_base = OTHER; note = 2'-Fluoro-adenosine
  modified_base 2^3: mod_base = OTHER; note = Phosphorothioate bond
  modified_base 3: mod_base = OTHER; note = 2'-O-methyl-adenosine
  modified_base 4: mod_base = OTHER; note = 2'-O-methyl-adenosine
  modified_base 5: mod_base = um
  modified_base 6: mod_base = OTHER; note = 2'-Fluoro-adenosine
  modified_base 7: mod_base = cm
  modified_base 8: mod_base = OTHER; note = 2'-Fluoro-adenosine
  modified_base 9: mod_base = OTHER; note = 2'-Fluoro-uridine
  modified_base 10: mod_base = OTHER; note = 2'-O-methyl-adenosine
  modified_base 11: mod_base = gm
  modified_base 12: mod_base = gm
  modified_base 13: mod_base = OTHER; note = 2'-O-methyl-adenosine
  modified_base 14: mod_base = OTHER; note = 2'-Fluoro-adenosine
  modified_base 15: mod_base = OTHER; note = 2'-O-methyl-adenosine
  modified_base 16: mod_base = OTHER; note = 2'-Fluoro-uridine
  modified_base 17: mod_base = um
  modified_base 18: mod_base = cm
  modified_base 19: mod_base = OTHER; note = 2'-O-methyl-adenosine
  modified_base 20: mod_base = OTHER; note = 2'-O-methyl-adenosine
  modified_base 21: mod_base = gm
  modified_base 21^22: mod_base = OTHER; note = Phosphorothioate bond
  modified_base 22: mod_base = um
  modified_base 22^23: mod_base = OTHER; note = Phosphorothioate bond
  modified_base 23: mod_base = um
aaaatacataggaaattcaagtt

SEQ ID NO: 407 - RNA, 23 nt, synthetic construct
  source 1..23: mol_type = other RNA
  modified_base 1: mod_base = gm
  modified_base 1^2: mod_base = OTHER; note = Phosphorothioate bond
  modified_base 2: mod_base = OTHER; note = 2'-Fluoro-uridine
  modified_base 2^3: mod_base = OTHER; note = Phosphorothioate bond
  modified_base 3: mod_base = OTHER; note = 2'-O-methyl-adenosine
  modified_base 4: mod_base = um
  modified_base 5: mod_base = cm
  modified_base 6: mod_base = OTHER; note = 2'-Fluoro-uridine
  modified_base 7: mod_base = cm
  modified_base 8: mod_base = OTHER; note = 2'-Fluoro-uridine
  modified_base 9: mod_base = OTHER; note = 2'-Fluoro-guanosine
  modified_base 10: mod_base = um
  modified_base 11: mod_base = OTHER; note = 2'-O-methyl-adenosine
  modified_base 12: mod_base = cm
  modified_base 13: mod_base = OTHER; note = 2'-O-methyl-adenosine
  modified_base 14: mod_base = OTHER; note = 2'-Fluoro-uridine
  modified_base 15: mod_base = cm
  modified_base 16: mod_base = OTHER; note = 2'-Fluoro-cytidine
  modified_base 17: mod_base = OTHER; note = 2'-O-methyl-adenosine
  modified_base 18: mod_base = gm
  modified_base 19: mod_base = cm
  modified_base 20: mod_base = OTHER; note = 2'-O-methyl-adenosine
  modified_base 21: mod_base = cm
  modified_base 21^22: mod_base = OTHER; note = Phosphorothioate bond
  modified_base 22: mod_base = cm
  modified_base 22^23: mod_base = OTHER; note = Phosphorothioate bond
  modified_base 23: mod_base = um
gtatctctgtacatccagcacct

SEQ ID NO: 408 - RNA, 23 nt, synthetic construct
  source 1..23: mol_type = other RNA
  modified_base 1: mod_base = um
  modified_base 1^2: mod_base = OTHER; note = Phosphorothioate bond
  modified_base 2: mod_base = OTHER; note = 2'-Fluoro-uridine
  modified_base 2^3: mod_base = OTHER; note = Phosphorothioate bond
  modified_base 3: mod_base = cm
  modified_base 4: mod_base = um
  modified_base 5: mod_base = um
  modified_base 6: mod_base = OTHER; note = 2'-Fluoro-uridine
  modified_base 7: mod_base = um
  modified_base 8: mod_base = OTHER; note = 2'-Fluoro-adenosine
  modified_base 9: mod_base = OTHER; note = 2'-Fluoro-adenosine
  modified_base 10: mod_base = gm
  modified_base 11: mod_base = gm
  modified_base 12: mod_base = cm
  modified_base 13: mod_base = OTHER; note = 2'-O-methyl-adenosine
  modified_base 14: mod_base = OTHER; note = 2'-Fluoro-cytidine
  modified_base 15: mod_base = um
  modified_base 16: mod_base = OTHER; note = 2'-Fluoro-uridine
  modified_base 17: mod_base = um
  modified_base 18: mod_base = gm
  modified_base 19: mod_base = gm
  modified_base 20: mod_base = OTHER; note = 2'-O-methyl-adenosine
  modified_base 21: mod_base = OTHER; note = 2'-O-methyl-adenosine
  modified_base 21^22: mod_base = OTHER; note = Phosphorothioate bond
  modified_base 22: mod_base = OTHER; note = 2'-O-methyl-adenosine
  modified_base 22^23: mod_base = OTHER; note = Phosphorothioate bond
  modified_base 23: mod_base = OTHER; note = 2'-O-methyl-adenosine
ttcttttaaggcactttggaaaa

SEQ ID NO: 409 - RNA, 23 nt, synthetic construct
  source 1..23: mol_type = other RNA
  modified_base 1: mod_base = gm
  modified_base 1^2: mod_base = OTHER; note = Phosphorothioate bond
  modified_base 2: mod_base = OTHER; note = 2'-Fluoro-guanosine
  modified_base 2^3: mod_base = OTHER; note = Phosphorothioate bond
  modified_base 3: mod_base = OTHER; note = 2'-O-methyl-adenosine
  modified_base 4: mod_base = OTHER; note = 2'-O-methyl-adenosine
  modified_base 5: mod_base = OTHER; note = 2'-O-methyl-adenosine
  modified_base 6: mod_base = OTHER; note = 2'-Fluoro-uridine
  modified_base 7: mod_base = um
  modified_base 8: mod_base = OTHER; note = 2'-Fluoro-cytidine
  modified_base 9: mod_base = OTHER; note = 2'-Fluoro-adenosine
  modified_base 10: mod_base = OTHER; note = 2'-O-methyl-adenosine
  modified_base 11: mod_base = gm
  modified_base 12: mod_base = um
  modified_base 13: mod_base = um
  modified_base 14: mod_base = OTHER; note = 2'-Fluoro-uridine
  modified_base 15: mod_base = OTHER; note = 2'-O-methyl-adenosine
  modified_base 16: mod_base = OTHER; note = 2'-Fluoro-cytidine
  modified_base 17: mod_base = OTHER; note = 2'-O-methyl-adenosine
  modified_base 18: mod_base = um
  modified_base 19: mod_base = OTHER; note = 2'-O-methyl-adenosine
  modified_base 20: mod_base = gm
  modified_base 21: mod_base = cm
  modified_base 21^22: mod_base = OTHER; note = Phosphorothioate bond
  modified_base 22: mod_base = OTHER; note = 2'-O-methyl-adenosine
  modified_base 22^23: mod_base = OTHER; note = Phosphorothioate bond
  modified_base 23: mod_base = um
ggaaattcaagtttacatagcat

SEQ ID NO: 410 - RNA, 23 nt, synthetic construct
  source 1..23: mol_type = other RNA
  modified_base 1: mod_base = OTHER; note = 2'-O-methyl-adenosine
  modified_base 1^2: mod_base = OTHER; note = Phosphorothioate bond
  modified_base 2: mod_base = OTHER; note = 2'-Fluoro-uridine
  modified_base 2^3: mod_base = OTHER; note = Phosphorothioate bond
  modified_base 3: mod_base = um
  modified_base 4: mod_base = gm
  modified_base 5: mod_base = cm
  modified_base 6: mod_base = OTHER; note = 2'-Fluoro-adenosine
  modified_base 7: mod_base = OTHER; note = 2'-O-methyl-adenosine
  modified_base 8: mod_base = OTHER; note = 2'-Fluoro-cytidine
  modified_base 9: mod_base = OTHER; note = 2'-Fluoro-guanosine
  modified_base 10: mod_base = gm
  modified_base 11: mod_base = OTHER; note = 2'-O-methyl-adenosine
  modified_base 12: mod_base = OTHER; note = 2'-O-methyl-adenosine
  modified_base 13: mod_base = OTHER; note = 2'-O-methyl-adenosine
  modified_base 14: mod_base = OTHER; note = 2'-Fluoro-uridine
  modified_base 15: mod_base = gm
  modified_base 16: mod_base = OTHER; note = 2'-Fluoro-uridine
  modified_base 17: mod_base = gm
  modified_base 18: mod_base = cm
  modified_base 19: mod_base = cm
  modified_base 20: mod_base = gm
  modified_base 21: mod_base = um
  modified_base 21^22: mod_base = OTHER; note = Phosphorothioate bond
  modified_base 22: mod_base = gm
  modified_base 22^23: mod_base = OTHER; note = Phosphorothioate bond
  modified_base 23: mod_base = gm
attgcaacggaaatgtgccgtgg

SEQ ID NO: 411 - RNA, 23 nt, synthetic construct
  source 1..23: mol_type = other RNA
  modified_base 1: mod_base = OTHER; note = 2'-O-methyl-adenosine
  modified_base 1^2: mod_base = OTHER; note = Phosphorothioate bond
  modified_base 2: mod_base = OTHER; note = 2'-Fluoro-guanosine
  modified_base 2^3: mod_base = OTHER; note = Phosphorothioate bond
  modified_base 3: mod_base = gm
  modified_base 4: mod_base = OTHER; note = 2'-O-methyl-adenosine
  modified_base 5: mod_base = OTHER; note = 2'-O-methyl-adenosine
  modified_base 6: mod_base = OTHER; note = 2'-Fluoro-adenosine
  modified_base 7: mod_base = um
  modified_base 8: mod_base = OTHER; note = 2'-Fluoro-uridine
  modified_base 9: mod_base = OTHER; note = 2'-Fluoro-cytidine
  modified_base 10: mod_base = OTHER; note = 2'-O-methyl-adenosine
  modified_base 11: mod_base = OTHER; note = 2'-O-methyl-adenosine
  modified_base 12: mod_base = gm
  modified_base 13: mod_base = um
  modified_base 14: mod_base = OTHER; note = 2'-Fluoro-uridine
  modified_base 15: mod_base = um
  modified_base 16: mod_base = OTHER; note = 2'-Fluoro-adenosine
  modified_base 17: mod_base = cm
  modified_base 18: mod_base = OTHER; note = 2'-O-methyl-adenosine
  modified_base 19: mod_base = um
  modified_base 20: mod_base = OTHER; note = 2'-O-methyl-adenosine
  modified_base 21: mod_base = gm
  modified_base 21^22: mod_base = OTHER; note = Phosphorothioate bond
  modified_base 22: mod_base = cm
  modified_base 22^23: mod_base = OTHER; note = Phosphorothioate bond
  modified_base 23: mod_base = OTHER; note = 2'-O-methyl-adenosine
aggaaattcaagtttacatagca

SEQ ID NO: 412 - RNA, 23 nt, synthetic construct
  source 1..23: mol_type = other RNA
  modified_base 1: mod_base = um
  modified_base 1^2: mod_base = OTHER; note = Phosphorothioate bond
  modified_base 2: mod_base = OTHER; note = 2'-Fluoro-adenosine
  modified_base 2^3: mod_base = OTHER; note = Phosphorothioate bond
  modified_base 3: mod_base = OTHER; note = 2'-O-methyl-adenosine
  modified_base 4: mod_base = um
  modified_base 5: mod_base = um
  modified_base 6: mod_base = OTHER; note = 2'-Fluoro-adenosine
  modified_base 7: mod_base = um
  modified_base 8: mod_base = OTHER; note = 2'-Fluoro-uridine
  modified_base 9: mod_base = OTHER; note = 2'-Fluoro-adenosine
  modified_base 10: mod_base = gm
  modified_base 11: mod_base = gm
  modified_base 12: mod_base = OTHER; note = 2'-O-methyl-adenosine
  modified_base 13: mod_base = OTHER; note = 2'-O-methyl-adenosine
  modified_base 14: mod_base = OTHER; note = 2'-Fluoro-adenosine
  modified_base 15: mod_base = um
  modified_base 16: mod_base = OTHER; note = 2'-Fluoro-cytidine
  modified_base 17: mod_base = cm
  modified_base 18: mod_base = OTHER; note = 2'-O-methyl-adenosine
  modified_base 19: mod_base = um
  modified_base 20: mod_base = um
  modified_base 21: mod_base = gm
  modified_base 21^22: mod_base = OTHER; note = Phosphorothioate bond
  modified_base 22: mod_base = OTHER; note = 2'-O-methyl-adenosine
  modified_base 22^23: mod_base = OTHER; note = Phosphorothioate bond
  modified_base 23: mod_base = um
taattattaggaaatccattgat

SEQ ID NO: 413 - RNA, 23 nt, synthetic construct
  source 1..23: mol_type = other RNA
  modified_base 1: mod_base = um
  modified_base 1^2: mod_base = OTHER; note = Phosphorothioate bond
  modified_base 2: mod_base = OTHER; note = 2'-Fluoro-uridine
  modified_base 2^3: mod_base = OTHER; note = Phosphorothioate bond
  modified_base 3: mod_base = um
  modified_base 4: mod_base = OTHER; note = 2'-O-methyl-adenosine
  modified_base 5: mod_base = cm
  modified_base 6: mod_base = OTHER; note = 2'-Fluoro-uridine
  modified_base 7: mod_base = um
  modified_base 8: mod_base = OTHER; note = 2'-Fluoro-adenosine
  modified_base 9: mod_base = OTHER; note = 2'-Fluoro-guanosine
  modified_base 10: mod_base = OTHER; note = 2'-O-methyl-adenosine
  modified_base 11: mod_base = gm
  modified_base 12: mod_base = cm
  modified_base 13: mod_base = OTHER; note = 2'-O-methyl-adenosine
  modified_base 14: mod_base = OTHER; note = 2'-Fluoro-guanosine
  modified_base 15: mod_base = OTHER; note = 2'-O-methyl-adenosine
  modified_base 16: mod_base = OTHER; note = 2'-Fluoro-guanosine
  modified_base 17: mod_base = OTHER; note = 2'-O-methyl-adenosine
  modified_base 18: mod_base = cm
  modified_base 19: mod_base = OTHER; note = 2'-O-methyl-adenosine
  modified_base 20: mod_base = cm
  modified_base 21: mod_base = cm
  modified_base 21^22: mod_base = OTHER; note = Phosphorothioate bond
  modified_base 22: mod_base = um
  modified_base 22^23: mod_base = OTHER; note = Phosphorothioate bond
  modified_base 23: mod_base = cm
tttacttagagcagagacacctc

SEQ ID NO: 414 - RNA, 23 nt, synthetic construct
  source 1..23: mol_type = other RNA
  modified_base 1: mod_base = um
  modified_base 1^2: mod_base = OTHER; note = Phosphorothioate bond
  modified_base 2: mod_base = OTHER; note = 2'-Fluoro-uridine
  modified_base 2^3: mod_base = OTHER; note = Phosphorothioate bond
  modified_base 3: mod_base = um
  modified_base 4: mod_base = cm
  modified_base 5: mod_base = um
  modified_base 6: mod_base = OTHER; note = 2'-Fluoro-uridine
  modified_base 7: mod_base = um
  modified_base 8: mod_base = OTHER; note = 2'-Fluoro-uridine
  modified_base 9: mod_base = OTHER; note = 2'-Fluoro-adenosine
  modified_base 10: mod_base = OTHER; note = 2'-O-methyl-adenosine
  modified_base 11: mod_base = gm
  modified_base 12: mod_base = gm
  modified_base 13: mod_base = cm
  modified_base 14: mod_base = OTHER; note = 2'-Fluoro-adenosine
  modified_base 15: mod_base = cm
  modified_base 16: mod_base = OTHER; note = 2'-Fluoro-uridine
  modified_base 17: mod_base = um
  modified_base 18: mod_base = um
  modified_base 19: mod_base = gm
  modified_base 20: mod_base = gm
  modified_base 21: mod_base = OTHER; note = 2'-O-methyl-adenosine
  modified_base 21^22: mod_base = OTHER; note = Phosphorothioate bond
  modified_base 22: mod_base = OTHER; note = 2'-O-methyl-adenosine
  modified_base 22^23: mod_base = OTHER; note = Phosphorothioate bond
  modified_base 23: mod_base = OTHER; note = 2'-O-methyl-adenosine
tttcttttaaggcactttggaaa

SEQ ID NO: 415 - RNA, 23 nt, synthetic construct
  source 1..23: mol_type = other RNA
  modified_base 1: mod_base = um
  modified_base 1^2: mod_base = OTHER; note = Phosphorothioate bond
  modified_base 2: mod_base = OTHER; note = 2'-Fluoro-adenosine
  modified_base 2^3: mod_base = OTHER; note = Phosphorothioate bond
  modified_base 3: mod_base = OTHER; note = 2'-O-methyl-adenosine
  modified_base 4: mod_base = um
  modified_base 5: mod_base = um
  modified_base 6: mod_base = OTHER; note = 2'-Fluoro-adenosine
  modified_base 7: mod_base = OTHER; note = 2'-O-methyl-adenosine
  modified_base 8: mod_base = OTHER; note = 2'-Fluoro-adenosine
  modified_base 9: mod_base = OTHER; note = 2'-Fluoro-adenosine
  modified_base 10: mod_base = gm
  modified_base 11: mod_base = gm
  modified_base 12: mod_base = cm
  modified_base 13: mod_base = OTHER; note = 2'-O-methyl-adenosine
  modified_base 14: mod_base = OTHER; note = 2'-Fluoro-cytidine
  modified_base 15: mod_base = OTHER; note = 2'-O-methyl-adenosine
  modified_base 16: mod_base = OTHER; note = 2'-Fluoro-uridine
  modified_base 17: mod_base = um
  modified_base 18: mod_base = cm
  modified_base 19: mod_base = OTHER; note = 2'-O-methyl-adenosine
  modified_base 20: mod_base = um
  modified_base 21: mod_base = gm
  modified_base 21^22: mod_base = OTHER; note = Phosphorothioate bond
  modified_base 22: mod_base = cm
  modified_base 22^23: mod_base = OTHER; note = Phosphorothioate bond
  modified_base 23: mod_base = um
taattaaaaggcacattcatgct

SEQ ID NO: 416 - RNA, 23 nt, synthetic construct
  source 1..23: mol_type = other RNA
  modified_base 1: mod_base = OTHER; note = 2'-O-methyl-adenosine
  modified_base 1^2: mod_base = OTHER; note = Phosphorothioate bond
  modified_base 2: mod_base = OTHER; note = 2'-Fluoro-uridine
  modified_base 2^3: mod_base = OTHER; note = Phosphorothioate bond
  modified_base 3: mod_base = OTHER; note = 2'-O-methyl-adenosine
  modified_base 4: mod_base = cm
  modified_base 5: mod_base = OTHER; note = 2'-O-methyl-adenosine
  modified_base 6: mod_base = OTHER; note = 2'-Fluoro-uridine
  modified_base 7: mod_base = OTHER; note = 2'-O-methyl-adenosine
  modified_base 8: mod_base = OTHER; note = 2'-Fluoro-guanosine
  modified_base 9: mod_base = OTHER; note = 2'-Fluoro-guanosine
  modified_base 10: mod_base = OTHER; note = 2'-O-methyl-adenosine
  modified_base 11: mod_base = OTHER; note = 2'-O-methyl-adenosine
  modified_base 12: mod_base = OTHER; note = 2'-O-methyl-adenosine
  modified_base 13: mod_base = um
  modified_base 14: mod_base = OTHER; note = 2'-Fluoro-uridine
  modified_base 15: mod_base = cm
  modified_base 16: mod_base = OTHER; note = 2'-Fluoro-adenosine
  modified_base 17: mod_base = OTHER; note = 2'-O-methyl-adenosine
  modified_base 18: mod_base = gm
  modified_base 19: mod_base = um
  modified_base 20: mod_base = um
  modified_base 21: mod_base = um
  modified_base 21^22: mod_base = OTHER; note = Phosphorothioate bond
  modified_base 22: mod_base = OTHER; note = 2'-O-methyl-adenosine
  modified_base 22^23: mod_base = OTHER; note = Phosphorothioate bond
  modified_base 23: mod_base = cm
atacataggaaattcaagtttac

SEQ ID NO: 417 - RNA, 23 nt, synthetic construct
  source 1..23: mol_type = other RNA
  modified_base 1: mod_base = gm
  modified_base 1^2: mod_base = OTHER; note = Phosphorothioate bond
  modified_base 2: mod_base = OTHER; note = 2'-Fluoro-guanosine
  modified_base 2^3: mod_base = OTHER; note = Phosphorothioate bond
  modified_base 3: mod_base = cm
  modified_base 4: mod_base = OTHER; note = 2'-O-methyl-adenosine
  modified_base 5: mod_base = cm
  modified_base 6: mod_base = OTHER; note = 2'-Fluoro-uridine
  modified_base 7: mod_base = um
  modified_base 8: mod_base = OTHER; note = 2'-Fluoro-uridine
  modified_base 9: mod_base = OTHER; note = 2'-Fluoro-guanosine
  modified_base 10: mod_base = gm
  modified_base 11: mod_base = OTHER; note = 2'-O-methyl-adenosine
  modified_base 12: mod_base = OTHER; note = 2'-O-methyl-adenosine
  modified_base 13: mod_base = OTHER; note = 2'-O-methyl-adenosine
  modified_base 14: mod_base = OTHER; note = 2'-Fluoro-adenosine
  modified_base 15: mod_base = gm
  modified_base 16: mod_base = OTHER; note = 2'-Fluoro-uridine
  modified_base 17: mod_base = cm
  modified_base 18: mod_base = OTHER; note = 2'-O-methyl-adenosine
  modified_base 19: mod_base = gm
  modified_base 20: mod_base = gm
  modified_base 21: mod_base = OTHER; note = 2'-O-methyl-adenosine
  modified_base 21^22: mod_base = OTHER; note = Phosphorothioate bond
  modified_base 22: mod_base = um
  modified_base 22^23: mod_base = OTHER; note = Phosphorothioate bond
  modified_base 23: mod_base = cm
ggcactttggaaaagtcaggatc

SEQ ID NO: 418 - RNA, 23 nt, synthetic construct
  source 1..23: mol_type = other RNA
  modified_base 1: mod_base = OTHER; note = 2'-O-methyl-adenosine
  modified_base 1^2: mod_base = OTHER; note = Phosphorothioate bond
  modified_base 2: mod_base = OTHER; note = 2'-Fluoro-uridine
  modified_base 2^3: mod_base = OTHER; note = Phosphorothioate bond
  modified_base 3: mod_base = um
  modified_base 4: mod_base = OTHER; note = 2'-O-methyl-adenosine
  modified_base 5: mod_base = um
  modified_base 6: mod_base = OTHER; note = 2'-Fluoro-uridine
  modified_base 7: mod_base = OTHER; note = 2'-O-methyl-adenosine
  modified_base 8: mod_base = OTHER; note = 2'-Fluoro-guanosine
  modified_base 9: mod_base = OTHER; note = 2'-Fluoro-guanosine
  modified_base 10: mod_base = OTHER; note = 2'-O-methyl-adenosine
  modified_base 11: mod_base = OTHER; note = 2'-O-methyl-adenosine
  modified_base 12: mod_base = OTHER; note = 2'-O-methyl-adenosine
  modified_base 13: mod_base = um
  modified_base 14: mod_base = OTHER; note = 2'-Fluoro-cytidine
  modified_base 15: mod_base = cm
  modified_base 16: mod_base = OTHER; note = 2'-Fluoro-adenosine
  modified_base 17: mod_base = um
  modified_base 18: mod_base = um
  modified_base 19: mod_base = gm
  modified_base 20: mod_base = OTHER; note = 2'-O-methyl-adenosine
  modified_base 21: mod_base = um
  modified_base 21^22: mod_base = OTHER; note = Phosphorothioate bond
  modified_base 22: mod_base = gm
  modified_base 22^23: mod_base = OTHER; note = Phosphorothioate bond
  modified_base 23: mod_base = gm
attattaggaaatccattgatgg

SEQ ID NO: 419 - RNA, 23 nt, synthetic construct
  source 1..23: mol_type = other RNA
  modified_base 1: mod_base = OTHER; note = 2'-O-methyl-adenosine
  modified_base 1^2: mod_base = OTHER; note = Phosphorothioate bond
  modified_base 2: mod_base = OTHER; note = 2'-Fluoro-cytidine
  modified_base 2^3: mod_base = OTHER; note = Phosphorothioate bond
  modified_base 3: mod_base = OTHER; note = 2'-O-methyl-adenosine
  modified_base 4: mod_base = cm
  modified_base 5: mod_base = cm
  modified_base 6: mod_base = OTHER; note = 2'-Fluoro-uridine
  modified_base 7: mod_base = cm
  modified_base 8: mod_base = OTHER; note = 2'-Fluoro-cytidine
  modified_base 9: mod_base = OTHER; note = 2'-Fluoro-adenosine
  modified_base 10: mod_base = OTHER; note = 2'-O-methyl-adenosine
  modified_base 11: mod_base = OTHER; note = 2'-O-methyl-adenosine
  modified_base 12: mod_base = OTHER; note = 2'-O-methyl-adenosine
  modified_base 13: mod_base = um
  modified_base 14: mod_base = OTHER; note = 2'-Fluoro-adenosine
  modified_base 15: mod_base = cm
  modified_base 16: mod_base = OTHER; note = 2'-Fluoro-uridine
  modified_base 17: mod_base = gm
  modified_base 18: mod_base = OTHER; note = 2'-O-methyl-adenosine
  modified_base 19: mod_base = OTHER; note = 2'-O-methyl-adenosine
  modified_base 20: mod_base = cm
  modified_base 21: mod_base = OTHER; note = 2'-O-methyl-adenosine
  modified_base 21^22: mod_base = OTHER; note = Phosphorothioate bond
  modified_base 22: mod_base = um
  modified_base 22^23: mod_base = OTHER; note = Phosphorothioate bond
  modified_base 23: mod_base = OTHER; note = 2'-O-methyl-adenosine
acacctccaaaatactgaacata

SEQ ID NO: 420 - RNA, 23 nt, synthetic construct
  source 1..23: mol_type = other RNA
  modified_base 1: mod_base = gm
  modified_base 1^2: mod_base = OTHER; note = Phosphorothioate bond
  modified_base 2: mod_base = OTHER; note = 2'-Fluoro-cytidine
  modified_base 2^3: mod_base = OTHER; note = Phosphorothioate bond
  modified_base 3: mod_base = OTHER; note = 2'-O-methyl-adenosine
  modified_base 4: mod_base = cm
  modified_base 5: mod_base = um
  modified_base 6: mod_base = OTHER; note = 2'-Fluoro-uridine
  modified_base 7: mod_base = um
  modified_base 8: mod_base = OTHER; note = 2'-Fluoro-guanosine
  modified_base 9: mod_base = OTHER; note = 2'-Fluoro-guanosine
  modified_base 10: mod_base = OTHER; note = 2'-O-methyl-adenosine
  modified_base 11: mod_base = OTHER; note = 2'-O-methyl-adenosine
  modified_base 12: mod_base = OTHER; note = 2'-O-methyl-adenosine
  modified_base 13: mod_base = OTHER; note = 2'-O-methyl-adenosine
  modified_base 14: mod_base = OTHER; note = 2'-Fluoro-guanosine
  modified_base 15: mod_base = um
  modified_base 16: mod_base = OTHER; note = 2'-Fluoro-cytidine
  modified_base 17: mod_base = OTHER; note = 2'-O-methyl-adenosine
  modified_base 18: mod_base = gm
  modified_base 19: mod_base = gm
  modified_base 20: mod_base = OTHER; note = 2'-O-methyl-adenosine
  modified_base 21: mod_base = um
  modified_base 21^22: mod_base = OTHER; note = Phosphorothioate bond
  modified_base 22: mod_base = cm
  modified_base 22^23: mod_base = OTHER; note = Phosphorothioate bond
  modified_base 23: mod_base = um
gcactttggaaaagtcaggatct

SEQ ID NO: 421 - RNA, 23 nt, synthetic construct
  source 1..23: mol_type = other RNA
  modified_base 1: mod_base = OTHER; note = 2'-O-methyl-adenosine
  modified_base 1^2: mod_base = OTHER; note = Phosphorothioate bond
  modified_base 2: mod_base = OTHER; note = 2'-Fluoro-adenosine
  modified_base 2^3: mod_base = OTHER; note = Phosphorothioate bond
  modified_base 3: mod_base = um
  modified_base 4: mod_base = OTHER; note = 2'-O-methyl-adenosine
  modified_base 5: mod_base = OTHER; note = 2'-O-methyl-adenosine
  modified_base 6: mod_base = OTHER; note = 2'-Fluoro-uridine
  modified_base 7: mod_base = um
  modified_base 8: mod_base = OTHER; note = 2'-Fluoro-adenosine
  modified_base 9: mod_base = OTHER; note = 2'-Fluoro-uridine
  modified_base 10: mod_base = um
  modified_base 11: mod_base = OTHER; note = 2'-O-methyl-adenosine
  modified_base 12: mod_base = gm
  modified_base 13: mod_base = gm
  modified_base 14: mod_base = OTHER; note = 2'-Fluoro-adenosine
  modified_base 15: mod_base = OTHER; note = 2'-O-methyl-adenosine
  modified_base 16: mod_base = OTHER; note = 2'-Fluoro-adenosine
  modified_base 17: mod_base = um
  modified_base 18: mod_base = cm
  modified_base 19: mod_base = cm
  modified_base 20: mod_base = OTHER; note = 2'-O-methyl-adenosine
  modified_base 21: mod_base = um
  modified_base 21^22: mod_base = OTHER; note = Phosphorothioate bond
  modified_base 22: mod_base = um
  modified_base 22^23: mod_base = OTHER; note = Phosphorothioate bond
  modified_base 23: mod_base = gm
aataattattaggaaatccattg

SEQ ID NO: 422 - RNA, 23 nt, synthetic construct
  source 1..23: mol_type = other RNA
  modified_base 1: mod_base = OTHER; note = 2'-O-methyl-adenosine
  modified_base 1^2: mod_base = OTHER; note = Phosphorothioate bond
  modified_base 2: mod_base = OTHER; note = 2'-Fluoro-uridine
  modified_base 2^3: mod_base = OTHER; note = Phosphorothioate bond
  modified_base 3: mod_base = um
  modified_base 4: mod_base = OTHER; note = 2'-O-methyl-adenosine
  modified_base 5: mod_base = OTHER; note = 2'-O-methyl-adenosine
  modified_base 6: mod_base = OTHER; note = 2'-Fluoro-adenosine
  modified_base 7: mod_base = OTHER; note = 2'-O-methyl-adenosine
  modified_base 8: mod_base = OTHER; note = 2'-Fluoro-guanosine
  modified_base 9: mod_base = OTHER; note = 2'-Fluoro-guanosine
  modified_base 10: mod_base = cm
  modified_base 11: mod_base = OTHER; note = 2'-O-methyl-adenosine
  modified_base 12: mod_base = cm
  modified_base 13: mod_base = OTHER; note = 2'-O-methyl-adenosine
  modified_base 14: mod_base = OTHER; note = 2'-Fluoro-uridine
  modified_base 15: mod_base = um
  modified_base 16: mod_base = OTHER; note = 2'-Fluoro-cytidine
  modified_base 17: mod_base = OTHER; note = 2'-O-methyl-adenosine
  modified_base 18: mod_base = um
  modified_base 19: mod_base = gm
  modified_base 20: mod_base = cm
  modified_base 21: mod_base = um
  modified_base 21^22: mod_base = OTHER; note = Phosphorothioate bond
  modified_base 22: mod_base = gm
  modified_base 22^23: mod_base = OTHER; note = Phosphorothioate bond
  modified_base 23: mod_base = gm
attaaaaggcacattcatgctgg

SEQ ID NO: 423 - RNA, 23 nt, synthetic construct
  source 1..23: mol_type = other RNA
  modified_base 1: mod_base = um
  modified_base 1^2: mod_base = OTHER; note = Phosphorothioate bond
  modified_base 2: mod_base = OTHER; note = 2'-Fluoro-guanosine
  modified_base 2^3: mod_base = OTHER; note = Phosphorothioate bond
  modified_base 3: mod_base = um
  modified_base 4: mod_base = um
  modified_base 5: mod_base = um
  modified_base 6: mod_base = OTHER; note = 2'-Fluoro-adenosine
  modified_base 7: mod_base = cm
  modified_base 8: mod_base = OTHER; note = 2'-Fluoro-uridine
  modified_base 9: mod_base = OTHER; note = 2'-Fluoro-uridine
  modified_base 10: mod_base = OTHER; note = 2'-O-methyl-adenosine
  modified_base 11: mod_base = gm
  modified_base 12: mod_base = OTHER; note = 2'-O-methyl-adenosine
  modified_base 13: mod_base = gm
  modified_base 14: mod_base = OTHER; note = 2'-Fluoro-cytidine
  modified_base 15: mod_base = OTHER; note = 2'-O-methyl-adenosine
  modified_base 16: mod_base = OTHER; note = 2'-Fluoro-guanosine
  modified_base 17: mod_base = OTHER; note = 2'-O-methyl-adenosine
  modified_base 18: mod_base = gm
  modified_base 19: mod_base = OTHER; note = 2'-O-methyl-adenosine
  modified_base 20: mod_base = cm
  modified_base 21: mod_base = OTHER; note = 2'-O-methyl-adenosine
  modified_base 21^22: mod_base = OTHER; note = Phosphorothioate bond
  modified_base 22: mod_base = cm
  modified_base 22^23: mod_base = OTHER; note = Phosphorothioate bond
  modified_base 23: mod_base = cm
tgtttacttagagcagagacacc

SEQ ID NO: 424 - RNA, 23 nt, synthetic construct
  source 1..23: mol_type = other RNA
  modified_base 1: mod_base = cm
  modified_base 1^2: mod_base = OTHER; note = Phosphorothioate bond
  modified_base 2: mod_base = OTHER; note = 2'-Fluoro-adenosine
  modified_base 2^3: mod_base = OTHER; note = Phosphorothioate bond
  modified_base 3: mod_base = cm
  modified_base 4: mod_base = cm
  modified_base 5: mod_base = um
  modified_base 6: mod_base = OTHER; note = 2'-Fluoro-cytidine
  modified_base 7: mod_base = cm
  modified_base 8: mod_base = OTHER; note = 2'-Fluoro-adenosine
  modified_base 9: mod_base = OTHER; note = 2'-Fluoro-adenosine
  modified_base 10: mod_base = OTHER; note = 2'-O-methyl-adenosine
  modified_base 11: mod_base = OTHER; note = 2'-O-methyl-adenosine
  modified_base 12: mod_base = um
  modified_base 13: mod_base = OTHER; note = 2'-O-methyl-adenosine
  modified_base 14: mod_base = OTHER; note = 2'-Fluoro-cytidine
  modified_base 15: mod_base = um
  modified_base 16: mod_base = OTHER; note = 2'-Fluoro-guanosine
  modified_base 17: mod_base = OTHER; note = 2'-O-methyl-adenosine
  modified_base 18: mod_base = OTHER; note = 2'-O-methyl-adenosine
  modified_base 19: mod_base = cm
  modified_base 20: mod_base = OTHER; note = 2'-O-methyl-adenosine
  modified_base 21: mod_base = um
  modified_base 21^22: mod_base = OTHER; note = Phosphorothioate bond
  modified_base 22: mod_base = OTHER; note = 2'-O-methyl-adenosine
  modified_base 22^23: mod_base = OTHER; note = Phosphorothioate bond
  modified_base 23: mod_base = OTHER; note = 2'-O-methyl-adenosine
cacctccaaaatactgaacataa

SEQ ID NO: 425 - RNA, 23 nt, synthetic construct
  source 1..23: mol_type = other RNA
  modified_base 1: mod_base = cm
  modified_base 1^2: mod_base = OTHER; note = Phosphorothioate bond
  modified_base 2: mod_base = OTHER; note = 2'-Fluoro-adenosine
  modified_base 2^3: mod_base = OTHER; note = Phosphorothioate bond
  modified_base 3: mod_base = cm
  modified_base 4: mod_base = um
  modified_base 5: mod_base = um
  modified_base 6: mod_base = OTHER; note = 2'-Fluoro-uridine
  modified_base 7: mod_base = gm
  modified_base 8: mod_base = OTHER; note = 2'-Fluoro-guanosine
  modified_base 9: mod_base = OTHER; note = 2'-Fluoro-adenosine
  modified_base 10: mod_base = OTHER; note = 2'-O-methyl-adenosine
  modified_base 11: mod_base = OTHER; note = 2'-O-methyl-adenosine
  modified_base 12: mod_base = OTHER; note = 2'-O-methyl-adenosine
  modified_base 13: mod_base = gm
  modified_base 14: mod_base = OTHER; note = 2'-Fluoro-uridine
  modified_base 15: mod_base = cm
  modified_base 16: mod_base = OTHER; note = 2'-Fluoro-adenosine
  modified_base 17: mod_base = gm
  modified_base 18: mod_base = gm
  modified_base 19: mod_base = OTHER; note = 2'-O-methyl-adenosine
  modified_base 20: mod_base = um
  modified_base 21: mod_base = cm
  modified_base 21^22: mod_base = OTHER; note = Phosphorothioate bond
  modified_base 22: mod_base = um
  modified_base 22^23: mod_base = OTHER; note = Phosphorothioate bond
  modified_base 23: mod_base = gm
cactttggaaaagtcaggatctg

SEQ ID NO: 426 - RNA, 23 nt, synthetic construct
  source 1..23: mol_type = other RNA
  modified_base 1: mod_base = OTHER; note = 2'-O-methyl-adenosine
  modified_base 1^2: mod_base = OTHER; note = Phosphorothioate bond
  modified_base 2: mod_base = OTHER; note = 2'-Fluoro-adenosine
  modified_base 2^3: mod_base = OTHER; note = Phosphorothioate bond
  modified_base 3: mod_base = OTHER; note = 2'-O-methyl-adenosine
  modified_base 4: mod_base = um
  modified_base 5: mod_base = um
  modified_base 6: mod_base = OTHER; note = 2'-Fluoro-cytidine
  modified_base 7: mod_base = OTHER; note = 2'-O-methyl-adenosine
  modified_base 8: mod_base = OTHER; note = 2'-Fluoro-adenosine
  modified_base 9: mod_base = OTHER; note = 2'-Fluoro-guanosine
  modified_base 10: mod_base = um
  modified_base 11: mod_base = um
  modified_base 12: mod_base = um
  modified_base 13: mod_base = OTHER; note = 2'-O-methyl-adenosine
  modified_base 14: mod_base = OTHER; note = 2'-Fluoro-cytidine
  modified_base 15: mod_base = OTHER; note = 2'-O-methyl-adenosine
  modified_base 16: mod_base = OTHER; note = 2'-Fluoro-uridine
  modified_base 17: mod_base = OTHER; note = 2'-O-methyl-adenosine
  modified_base 18: mod_base = gm
  modified_base 19: mod_base = cm
  modified_base 20: mod_base = OTHER; note = 2'-O-methyl-adenosine
  modified_base 21: mod_base = um
  modified_base 21^22: mod_base = OTHER; note = Phosphorothioate bond
  modified_base 22: mod_base = gm
  modified_base 22^23: mod_base = OTHER; note = Phosphorothioate bond
  modified_base 23: mod_base = cm
aaattcaagtttacatagcatgc

SEQ ID NO: 427 - RNA, 23 nt, synthetic construct
  source 1..23: mol_type = other RNA
  modified_base 1: mod_base = OTHER; note = 2'-O-methyl-adenosine
  modified_base 1^2: mod_base = OTHER; note = Phosphorothioate bond
  modified_base 2: mod_base = OTHER; note = 2'-Fluoro-adenosine
  modified_base 2^3: mod_base = OTHER; note = Phosphorothioate bond
  modified_base 3: mod_base = OTHER; note = 2'-O-methyl-adenosine
  modified_base 4: mod_base = cm
  modified_base 5: mod_base = um
  modified_base 6: mod_base = OTHER; note = 2'-Fluoro-guanosine
  modified_base 7: mod_base = um
  modified_base 8: mod_base = OTHER; note = 2'-Fluoro-uridine
  modified_base 9: mod_base = OTHER; note = 2'-Fluoro-guanosine
  modified_base 10: mod_base = um
  modified_base 11: mod_base = um
  modified_base 12: mod_base = um
  modified_base 13: mod_base = OTHER; note = 2'-O-methyl-adenosine
  modified_base 14: mod_base = OTHER; note = 2'-Fluoro-cytidine
  modified_base 15: mod_base = um
  modified_base 16: mod_base = OTHER; note = 2'-Fluoro-uridine
  modified_base 17: mod_base = OTHER; note = 2'-O-methyl-adenosine
  modified_base 18: mod_base = gm
  modified_base 19: mod_base = OTHER; note = 2'-O-methyl-adenosine
  modified_base 20: mod_base = gm
  modified_base 21: mod_base = cm
  modified_base 21^22: mod_base = OTHER; note = Phosphorothioate bond
  modified_base 22: mod_base = OTHER; note = 2'-O-methyl-adenosine
  modified_base 22^23: mod_base = OTHER; note = Phosphorothioate bond
  modified_base 23: mod_base = gm
aaactgttgtttacttagagcag

SEQ ID NO: 428 - RNA, 23 nt, synthetic construct
  source 1..23: mol_type = other RNA
  modified_base 1: mod_base = gm
  modified_base 1^2: mod_base = OTHER; note = Phosphorothioate bond
  modified_base 2: mod_base = OTHER; note = 2'-Fluoro-guanosine
  modified_base 2^3: mod_base = OTHER; note = Phosphorothioate bond
  modified_base 3: mod_base = gm
  modified_base 4: mod_base = um
  modified_base 5: mod_base = OTHER; note = 2'-O-methyl-adenosine
  modified_base 6: mod_base = OTHER; note = 2'-Fluoro-uridine
  modified_base 7: mod_base = cm
  modified_base 8: mod_base = OTHER; note = 2'-Fluoro-uridine
  modified_base 9: mod_base = OTHER; note = 2'-Fluoro-cytidine
  modified_base 10: mod_base = um
  modified_base 11: mod_base = gm
  modified_base 12: mod_base = um
  modified_base 13: mod_base = OTHER; note = 2'-O-methyl-adenosine
  modified_base 14: mod_base = OTHER; note = 2'-Fluoro-cytidine
  modified_base 15: mod_base = OTHER; note = 2'-O-methyl-adenosine
  modified_base 16: mod_base = OTHER; note = 2'-Fluoro-uridine
  modified_base 17: mod_base = cm
  modified_base 18: mod_base = cm
  modified_base 19: mod_base = OTHER; note = 2'-O-methyl-adenosine
  modified_base 20: mod_base = gm
  modified_base 21: mod_base = cm
  modified_base 21^22: mod_base = OTHER; note = Phosphorothioate bond
  modified_base 22: mod_base = OTHER; note = 2'-O-methyl-adenosine
  modified_base 22^23: mod_base = OTHER; note = Phosphorothioate bond
  modified_base 23: mod_base = cm
gggtatctctgtacatccagcac

SEQ ID NO: 429 - RNA, 23 nt, synthetic construct
  source 1..23: mol_type = other RNA
  modified_base 1: mod_base = gm
  modified_base 1^2: mod_base = OTHER; note = Phosphorothioate bond
  modified_base 2: mod_base = OTHER; note = 2'-Fluoro-uridine
  modified_base 2^3: mod_base = OTHER; note = Phosphorothioate bond
  modified_base 3: mod_base = um
  modified_base 4: mod_base = gm
  modified_base 5: mod_base = um
  modified_base 6: mod_base = OTHER; note = 2'-Fluoro-uridine
  modified_base 7: mod_base = um
  modified_base 8: mod_base = OTHER; note = 2'-Fluoro-adenosine
  modified_base 9: mod_base = OTHER; note = 2'-Fluoro-cytidine
  modified_base 10: mod_base = um
  modified_base 11: mod_base = um
  modified_base 12: mod_base = OTHER; note = 2'-O-methyl-adenosine
  modified_base 13: mod_base = gm
  modified_base 14: mod_base = OTHER; note = 2'-Fluoro-adenosine
  modified_base 15: mod_base = gm
  modified_base 16: mod_base = OTHER; note = 2'-Fluoro-cytidine
  modified_base 17: mod_base = OTHER; note = 2'-O-methyl-adenosine
  modified_base 18: mod_base = gm
  modified_base 19: mod_base = OTHER; note = 2'-O-methyl-adenosine
  modified_base 20: mod_base = gm
  modified_base 21: mod_base = OTHER; note = 2'-O-methyl-adenosine
  modified_base 21^22: mod_base = OTHER; note = Phosphorothioate bond
  modified_base 22: mod_base = cm
  modified_base 22^23: mod_base = OTHER; note = Phosphorothioate bond
  modified_base 23: mod_base = OTHER; note = 2'-O-methyl-adenosine
gttgtttacttagagcagagaca

SEQ ID NO: 430 - RNA, 23 nt, synthetic construct
  source 1..23: mol_type = other RNA
  modified_base 1: mod_base = um
  modified_base 1^2: mod_base = OTHER; note = Phosphorothioate bond
  modified_base 2: mod_base = OTHER; note = 2'-Fluoro-adenosine
  modified_base 2^3: mod_base = OTHER; note = Phosphorothioate bond
  modified_base 3: mod_base = gm
  modified_base 4: mod_base = gm
  modified_base 5: mod_base = OTHER; note = 2'-O-methyl-adenosine
  modified_base 6: mod_base = OTHER; note = 2'-Fluoro-adenosine
  modified_base 7: mod_base = OTHER; note = 2'-O-methyl-adenosine
  modified_base 8: mod_base = OTHER; note = 2'-Fluoro-uridine
  modified_base 9: mod_base = OTHER; note = 2'-Fluoro-uridine
  modified_base 10: mod_base = cm
  modified_base 11: mod_base = OTHER; note = 2'-O-methyl-adenosine
  modified_base 12: mod_base = OTHER; note = 2'-O-methyl-adenosine
  modified_base 13: mod_base = gm
  modified_base 14: mod_base = OTHER; note = 2'-Fluoro-uridine
  modified_base 15: mod_base = um
  modified_base 16: mod_base = OTHER; note = 2'-Fluoro-uridine
  modified_base 17: mod_base = OTHER; note = 2'-O-methyl-adenosine
  modified_base 18: mod_base = cm
  modified_base 19: mod_base = OTHER; note = 2'-O-methyl-adenosine
  modified_base 20: mod_base = um
  modified_base 21: mod_base = OTHER; note = 2'-O-methyl-adenosine
  modified_base 21^22: mod_base = OTHER; note = Phosphorothioate bond
  modified_base 22: mod_base = gm
  modified_base 22^23: mod_base = OTHER; note = Phosphorothioate bond
  modified_base 23: mod_base = cm
taggaaattcaagtttacatagc

SEQ ID NO: 431 - RNA, 23 nt, synthetic construct
  source 1..23: mol_type = other RNA
  modified_base 1: mod_base = OTHER; note = 2'-O-methyl-adenosine
  modified_base 1^2: mod_base = OTHER; note = Phosphorothioate bond
  modified_base 2: mod_base = OTHER; note = 2'-Fluoro-uridine
  modified_base 2^3: mod_base = OTHER; note = Phosphorothioate bond
  modified_base 3: mod_base = gm
  modified_base 4: mod_base = um
  modified_base 5: mod_base = cm
  modified_base 6: mod_base = OTHER; note = 2'-Fluoro-cytidine
  modified_base 7: mod_base = OTHER; note = 2'-O-methyl-adenosine
  modified_base 8: mod_base = OTHER; note = 2'-Fluoro-cytidine
  modified_base 9: mod_base = OTHER; note = 2'-Fluoro-uridine
  modified_base 10: mod_base = gm
  modified_base 11: mod_base = um
  modified_base 12: mod_base = gm
  modified_base 13: mod_base = OTHER; note = 2'-O-methyl-adenosine
  modified_base 14: mod_base = OTHER; note = 2'-Fluoro-uridine
  modified_base 15: mod_base = um
  modified_base 16: mod_base = OTHER; note = 2'-Fluoro-uridine
  modified_base 17: mod_base = gm
  modified_base 18: mod_base = gm
  modified_base 19: mod_base = gm
  modified_base 20: mod_base = um
  modified_base 21: mod_base = OTHER; note = 2'-O-methyl-adenosine
  modified_base 21^22: mod_base = OTHER; note = Phosphorothioate bond
  modified_base 22: mod_base = um
  modified_base 22^23: mod_base = OTHER; note = Phosphorothioate bond
  modified_base 23: mod_base = OTHER; note = 2'-O-methyl-adenosine
atgtccactgtgatttgggtata

SEQ ID NO: 432 - RNA, 23 nt, synthetic construct
  source 1..23: mol_type = other RNA
  modified_base 1: mod_base = OTHER; note = 2'-O-methyl-adenosine
  modified_base 1^2: mod_base = OTHER; note = Phosphorothioate bond
  modified_base 2: mod_base = OTHER; note = 2'-Fluoro-uridine
  modified_base 2^3: mod_base = OTHER; note = Phosphorothioate bond
  modified_base 3: mod_base = um
  modified_base 4: mod_base = cm
  modified_base 5: mod_base = gm
  modified_base 6: mod_base = OTHER; note = 2'-Fluoro-guanosine
  modified_base 7: mod_base = um
  modified_base 8: mod_base = OTHER; note = 2'-Fluoro-cytidine
  modified_base 9: mod_base = OTHER; note = 2'-Fluoro-adenosine
  modified_base 10: mod_base = OTHER; note = 2'-O-methyl-adenosine
  modified_base 11: mod_base = OTHER; note = 2'-O-methyl-adenosine
  modified_base 12: mod_base = cm
  modified_base 13: mod_base = cm
  modified_base 14: mod_base = OTHER; note = 2'-Fluoro-uridine
  modified_base 15: mod_base = cm
  modified_base 16: mod_base = OTHER; note = 2'-Fluoro-uridine
  modified_base 17: mod_base = gm
  modified_base 18: mod_base = OTHER; note = 2'-O-methyl-adenosine
  modified_base 19: mod_base = gm
  modified_base 20: mod_base = gm
  modified_base 21: mod_base = OTHER; note = 2'-O-methyl-adenosine
  modified_base 21^22: mod_base = OTHER; note = Phosphorothioate bond
  modified_base 22: mod_base = um
  modified_base 22^23: mod_base = OTHER; note = Phosphorothioate bond
  modified_base 23: mod_base = um
attcggtcaaacctctgaggatt

SEQ ID NO: 433 - RNA, 23 nt, synthetic construct
  source 1..23: mol_type = other RNA
  modified_base 1: mod_base = OTHER; note = 2'-O-methyl-adenosine
  modified_base 1^2: mod_base = OTHER; note = Phosphorothioate bond
  modified_base 2: mod_base = OTHER; note = 2'-Fluoro-adenosine
  modified_base 2^3: mod_base = OTHER; note = Phosphorothioate bond
  modified_base 3: mod_base = OTHER; note = 2'-O-methyl-adenosine
  modified_base 4: mod_base = um
  modified_base 5: mod_base = OTHER; note = 2'-O-methyl-adenosine
  modified_base 6: mod_base = OTHER; note = 2'-Fluoro-cytidine
  modified_base 7: mod_base = OTHER; note = 2'-O-methyl-adenosine
  modified_base 8: mod_base = OTHER; note = 2'-Fluoro-uridine
  modified_base 9: mod_base = OTHER; note = 2'-Fluoro-adenosine
  modified_base 10: mod_base = gm
  modified_base 11: mod_base = gm
  modified_base 12: mod_base = OTHER; note = 2'-O-methyl-adenosine
  modified_base 13: mod_base = OTHER; note = 2'-O-methyl-adenosine
  modified_base 14: mod_base = OTHER; note = 2'-Fluoro-adenosine
  modified_base 15: mod_base = um
  modified_base 16: mod_base = OTHER; note = 2'-Fluoro-uridine
  modified_base 17: mod_base = cm
  modified_base 18: mod_base = OTHER; note = 2'-O-methyl-adenosine
  modified_base 19: mod_base = OTHER; note = 2'-O-methyl-adenosine
  modified_base 20: mod_base = gm
  modified_base 21: mod_base = um
  modified_base 21^22: mod_base = OTHER; note = Phosphorothioate bond
  modified_base 22: mod_base = um
  modified_base 22^23: mod_base = OTHER; note = Phosphorothioate bond
  modified_base 23: mod_base = um
aaatacataggaaattcaagttt

SEQ ID NO: 434 - RNA, 23 nt, synthetic construct
  source 1..23: mol_type = other RNA
  modified_base 1: mod_base = cm
  modified_base 1^2: mod_base = OTHER; note = Phosphorothioate bond
  modified_base 2: mod_base = OTHER; note = 2'-Fluoro-uridine
  modified_base 2^3: mod_base = OTHER; note = Phosphorothioate bond
  modified_base 3: mod_base = OTHER; note = 2'-O-methyl-adenosine
  modified_base 4: mod_base = OTHER; note = 2'-O-methyl-adenosine
  modified_base 5: mod_base = um
  modified_base 6: mod_base = OTHER; note = 2'-Fluoro-uridine
  modified_base 7: mod_base = OTHER; note = 2'-O-methyl-adenosine
  modified_base 8: mod_base = OTHER; note = 2'-Fluoro-adenosine
  modified_base 9: mod_base = OTHER; note = 2'-Fluoro-adenosine
  modified_base 10: mod_base = OTHER; note = 2'-O-methyl-adenosine
  modified_base 11: mod_base = gm
  modified_base 12: mod_base = gm
  modified_base 13: mod_base = cm
  modified_base 14: mod_base = OTHER; note = 2'-Fluoro-adenosine
  modified_base 15: mod_base = cm
  modified_base 16: mod_base = OTHER; note = 2'-Fluoro-adenosine
  modified_base 17: mod_base = um
  modified_base 18: mod_base = um
  modified_base 19: mod_base = cm
  modified_base 20: mod_base = OTHER; note = 2'-O-methyl-adenosine
  modified_base 21: mod_base = um
  modified_base 21^22: mod_base = OTHER; note = Phosphorothioate bond
  modified_base 22: mod_base = gm
  modified_base 22^23: mod_base = OTHER; note = Phosphorothioate bond
  modified_base 23: mod_base = cm
ctaattaaaaggcacattcatgc

SEQ ID NO: 435 - RNA, 23 nt, synthetic construct
  source 1..23: mol_type = other RNA
  modified_base 1: mod_base = cm
  modified_base 1^2: mod_base = OTHER; note = Phosphorothioate bond
  modified_base 2: mod_base = OTHER; note = 2'-Fluoro-cytidine
  modified_base 2^3: mod_base = OTHER; note = Phosphorothioate bond
  modified_base 3: mod_base = OTHER; note = 2'-O-methyl-adenosine
  modified_base 4: mod_base = cm
  modified_base 5: mod_base = cm
  modified_base 6: mod_base = OTHER; note = 2'-Fluoro-uridine
  modified_base 7: mod_base = um
  modified_base 8: mod_base = OTHER; note = 2'-Fluoro-guanosine
  modified_base 9: mod_base = OTHER; note = 2'-Fluoro-uridine
  modified_base 10: mod_base = gm
  modified_base 11: mod_base = OTHER; note = 2'-O-methyl-adenosine
  modified_base 12: mod_base = gm
  modified_base 13: mod_base = gm
  modified_base 14: mod_base = OTHER; note = 2'-Fluoro-adenosine
  modified_base 15: mod_base = gm
  modified_base 16: mod_base = OTHER; note = 2'-Fluoro-adenosine
  modified_base 17: mod_base = gm
  modified_base 18: mod_base = OTHER; note = 2'-O-methyl-adenosine
  modified_base 19: mod_base = cm
  modified_base 20: mod_base = gm
  modified_base 21: mod_base = cm
  modified_base 21^22: mod_base = OTHER; note = Phosphorothioate bond
  modified_base 22: mod_base = OTHER; note = 2'-O-methyl-adenosine
  modified_base 22^23: mod_base = OTHER; note = Phosphorothioate bond
  modified_base 23: mod_base = gm
ccaccttgtgaggagagacgcag

SEQ ID NO: 436 - RNA, 23 nt, synthetic construct
  source 1..23: mol_type = other RNA
  modified_base 1: mod_base = um
  modified_base 1^2: mod_base = OTHER; note = Phosphorothioate bond
  modified_base 2: mod_base = OTHER; note = 2'-Fluoro-guanosine
  modified_base 2^3: mod_base = OTHER; note = Phosphorothioate bond
  modified_base 3: mod_base = um
  modified_base 4: mod_base = cm
  modified_base 5: mod_base = cm
  modified_base 6: mod_base = OTHER; note = 2'-Fluoro-adenosine
  modified_base 7: mod_base = cm
  modified_base 8: mod_base = OTHER; note = 2'-Fluoro-uridine
  modified_base 9: mod_base = OTHER; note = 2'-Fluoro-guanosine
  modified_base 10: mod_base = um
  modified_base 11: mod_base = gm
  modified_base 12: mod_base = OTHER; note = 2'-O-methyl-adenosine
  modified_base 13: mod_base = um
  modified_base 14: mod_base = OTHER; note = 2'-Fluoro-uridine
  modified_base 15: mod_base = um
  modified_base 16: mod_base = OTHER; note = 2'-Fluoro-guanosine
  modified_base 17: mod_base = gm
  modified_base 18: mod_base = gm
  modified_base 19: mod_base = um
  modified_base 20: mod_base = OTHER; note = 2'-O-methyl-adenosine
  modified_base 21: mod_base = um
  modified_base 21^22: mod_base = OTHER; note = Phosphorothioate bond
  modified_base 22: mod_base = OTHER; note = 2'-O-methyl-adenosine
  modified_base 22^23: mod_base = OTHER; note = Phosphorothioate bond
  modified_base 23: mod_base = cm
tgtccactgtgatttgggtatac

SEQ ID NO: 437 - RNA, 23 nt, synthetic construct
  source 1..23: mol_type = other RNA
  modified_base 1: mod_base = um
  modified_base 1^2: mod_base = OTHER; note = Phosphorothioate bond
  modified_base 2: mod_base = OTHER; note = 2'-Fluoro-adenosine
  modified_base 2^3: mod_base = OTHER; note = Phosphorothioate bond
  modified_base 3: mod_base = cm
  modified_base 4: mod_base = OTHER; note = 2'-O-methyl-adenosine
  modified_base 5: mod_base = um
  modified_base 6: mod_base = OTHER; note = 2'-Fluoro-adenosine
  modified_base 7: mod_base = gm
  modified_base 8: mod_base = OTHER; note = 2'-Fluoro-guanosine
  modified_base 9: mod_base = OTHER; note = 2'-Fluoro-adenosine
  modified_base 10: mod_base = OTHER; note = 2'-O-methyl-adenosine
  modified_base 11: mod_base = OTHER; note = 2'-O-methyl-adenosine
  modified_base 12: mod_base = um
  modified_base 13: mod_base = um
  modified_base 14: mod_base = OTHER; note = 2'-Fluoro-cytidine
  modified_base 15: mod_base = OTHER; note = 2'-O-methyl-adenosine
  modified_base 16: mod_base = OTHER; note = 2'-Fluoro-adenosine
  modified_base 17: mod_base = gm
  modified_base 18: mod_base = um
  modified_base 19: mod_base = um
  modified_base 20: mod_base = um
  modified_base 21: mod_base = OTHER; note = 2'-O-methyl-adenosine
  modified_base 21^22: mod_base = OTHER; note = Phosphorothioate bond
  modified_base 22: mod_base = cm
  modified_base 22^23: mod_base = OTHER; note = Phosphorothioate bond
  modified_base 23: mod_base = OTHER; note = 2'-O-methyl-adenosine
tacataggaaattcaagtttaca

SEQ ID NO: 438 - RNA, 23 nt, synthetic construct
  source 1..23: mol_type = other RNA
  modified_base 1: mod_base = cm
  modified_base 1^2: mod_base = OTHER; note = Phosphorothioate bond
  modified_base 2: mod_base = OTHER; note = 2'-Fluoro-uridine
  modified_base 2^3: mod_base = OTHER; note = Phosphorothioate bond
  modified_base 3: mod_base = um
  modified_base 4: mod_base = um
  modified_base 5: mod_base = OTHER; note = 2'-O-methyl-adenosine
  modified_base 6: mod_base = OTHER; note = 2'-Fluoro-cytidine
  modified_base 7: mod_base = OTHER; note = 2'-O-methyl-adenosine
  modified_base 8: mod_base = OTHER; note = 2'-Fluoro-uridine
  modified_base 9: mod_base = OTHER; note = 2'-Fluoro-uridine
  modified_base 10: mod_base = cm
  modified_base 11: mod_base = OTHER; note = 2'-O-methyl-adenosine
  modified_base 12: mod_base = gm
  modified_base 13: mod_base = OTHER; note = 2'-O-methyl-adenosine
  modified_base 14: mod_base = OTHER; note = 2'-Fluoro-adenosine
  modified_base 15: mod_base = OTHER; note = 2'-O-methyl-adenosine
  modified_base 16: mod_base = OTHER; note = 2'-Fluoro-uridine
  modified_base 17: mod_base = cm
  modified_base 18: mod_base = OTHER; note = 2'-O-methyl-adenosine
  modified_base 19: mod_base = gm
  modified_base 20: mod_base = OTHER; note = 2'-O-methyl-adenosine
  modified_base 21: mod_base = cm
  modified_base 21^22: mod_base = OTHER; note = Phosphorothioate bond
  modified_base 22: mod_base = OTHER; note = 2'-O-methyl-adenosine
  modified_base 22^23: mod_base = OTHER; note = Phosphorothioate bond
  modified_base 23: mod_base = OTHER; note = 2'-O-methyl-adenosine
ctttacattcagaaatcagacaa

SEQ ID NO: 439 - RNA, 23 nt, synthetic construct
  source 1..23: mol_type = other RNA
  modified_base 1: mod_base = cm
  modified_base 1^2: mod_base = OTHER; note = Phosphorothioate bond
  modified_base 2: mod_base = OTHER; note = 2'-Fluoro-cytidine
  modified_base 2^3: mod_base = OTHER; note = Phosphorothioate bond
  modified_base 3: mod_base = OTHER; note = 2'-O-methyl-adenosine
  modified_base 4: mod_base = OTHER; note = 2'-O-methyl-adenosine
  modified_base 5: mod_base = um
  modified_base 6: mod_base = OTHER; note = 2'-Fluoro-adenosine
  modified_base 7: mod_base = OTHER; note = 2'-O-methyl-adenosine
  modified_base 8: mod_base = OTHER; note = 2'-Fluoro-uridine
  modified_base 9: mod_base = OTHER; note = 2'-Fluoro-uridine
  modified_base 10: mod_base = OTHER; note = 2'-O-methyl-adenosine
  modified_base 11: mod_base = um
  modified_base 12: mod_base = um
  modified_base 13: mod_base = OTHER; note = 2'-O-methyl-adenosine
  modified_base 14: mod_base = OTHER; note = 2'-Fluoro-guanosine
  modified_base 15: mod_base = gm
  modified_base 16: mod_base = OTHER; note = 2'-Fluoro-adenosine
  modified_base 17: mod_base = OTHER; note = 2'-O-methyl-adenosine
  modified_base 18: mod_base = OTHER; note = 2'-O-methyl-adenosine
  modified_base 19: mod_base = um
  modified_base 20: mod_base = cm
  modified_base 21: mod_base = cm
  modified_base 21^22: mod_base = OTHER; note = Phosphorothioate bond
  modified_base 22: mod_base = OTHER; note = 2'-O-methyl-adenosine
  modified_base 22^23: mod_base = OTHER; note = Phosphorothioate bond
  modified_base 23: mod_base = um
ccaataattattaggaaatccat

SEQ ID NO: 440 - RNA, 23 nt, synthetic construct
  source 1..23: mol_type = other RNA
  modified_base 1: mod_base = um
  modified_base 1^2: mod_base = OTHER; note = Phosphorothioate bond
  modified_base 2: mod_base = OTHER; note = 2'-Fluoro-guanosine
  modified_base 2^3: mod_base = OTHER; note = Phosphorothioate bond
  modified_base 3: mod_base = cm
  modified_base 4: mod_base = um
  modified_base 5: mod_base = cm
  modified_base 6: mod_base = OTHER; note = 2'-Fluoro-cytidine
  modified_base 7: mod_base = um
  modified_base 8: mod_base = OTHER; note = 2'-Fluoro-guanosine
  modified_base 9: mod_base = OTHER; note = 2'-Fluoro-cytidine
  modified_base 10: mod_base = cm
  modified_base 11: mod_base = gm
  modified_base 12: mod_base = gm
  modified_base 13: mod_base = um
  modified_base 14: mod_base = OTHER; note = 2'-Fluoro-uridine
  modified_base 15: mod_base = gm
  modified_base 16: mod_base = OTHER; note = 2'-Fluoro-cytidine
  modified_base 17: mod_base = gm
  modified_base 18: mod_base = gm
  modified_base 19: mod_base = OTHER; note = 2'-O-methyl-adenosine
  modified_base 20: mod_base = OTHER; note = 2'-O-methyl-adenosine
  modified_base 21: mod_base = um
  modified_base 21^22: mod_base = OTHER; note = Phosphorothioate bond
  modified_base 22: mod_base = gm
  modified_base 22^23: mod_base = OTHER; note = Phosphorothioate bond
  modified_base 23: mod_base = gm
tgctcctgccggttgcggaatgg

SEQ ID NO: 441 - RNA, 23 nt, synthetic construct
  source 1..23: mol_type = other RNA
  modified_base 1: mod_base = um
  modified_base 1^2: mod_base = OTHER; note = Phosphorothioate bond
  modified_base 2: mod_base = OTHER; note = 2'-Fluoro-uridine
  modified_base 2^3: mod_base = OTHER; note = Phosphorothioate bond
  modified_base 3: mod_base = gm
  modified_base 4: mod_base = um
  modified_base 5: mod_base = um
  modified_base 6: mod_base = OTHER; note = 2'-Fluoro-uridine
  modified_base 7: mod_base = OTHER; note = 2'-O-methyl-adenosine
  modified_base 8: mod_base = OTHER; note = 2'-Fluoro-cytidine
  modified_base 9: mod_base = OTHER; note = 2'-Fluoro-uridine
  modified_base 10: mod_base = um
  modified_base 11: mod_base = OTHER; note = 2'-O-methyl-adenosine
  modified_base 12: mod_base = gm
  modified_base 13: mod_base = OTHER; note = 2'-O-methyl-adenosine
  modified_base 14: mod_base = OTHER; note = 2'-Fluoro-guanosine
  modified_base 15: mod_base = cm
  modified_base 16: mod_base = OTHER; note = 2'-Fluoro-adenosine
  modified_base 17: mod_base = gm
  modified_base 18: mod_base = OTHER; note = 2'-O-methyl-adenosine
  modified_base 19: mod_base = gm
  modified_base 20: mod_base = OTHER; note = 2'-O-methyl-adenosine
  modified_base 21: mod_base = cm
  modified_base 21^22: mod_base = OTHER; note = Phosphorothioate bond
  modified_base 22: mod_base = OTHER; note = 2'-O-methyl-adenosine
  modified_base 22^23: mod_base = OTHER; note = Phosphorothioate bond
  modified_base 23: mod_base = cm
ttgtttacttagagcagagacac

SEQ ID NO: 442 - RNA, 23 nt, synthetic construct
  source 1..23: mol_type = other RNA
  modified_base 1: mod_base = OTHER; note = 2'-O-methyl-adenosine
  modified_base 1^2: mod_base = OTHER; note = Phosphorothioate bond
  modified_base 2: mod_base = OTHER; note = 2'-Fluoro-cytidine
  modified_base 2^3: mod_base = OTHER; note = Phosphorothioate bond
  modified_base 3: mod_base = um
  modified_base 4: mod_base = gm
  modified_base 5: mod_base = um
  modified_base 6: mod_base = OTHER; note = 2'-Fluoro-uridine
  modified_base 7: mod_base = gm
  modified_base 8: mod_base = OTHER; note = 2'-Fluoro-uridine
  modified_base 9: mod_base = OTHER; note = 2'-Fluoro-uridine
  modified_base 10: mod_base = um
  modified_base 11: mod_base = OTHER; note = 2'-O-methyl-adenosine
  modified_base 12: mod_base = cm
  modified_base 13: mod_base = um
  modified_base 14: mod_base = OTHER; note = 2'-Fluoro-uridine
  modified_base 15: mod_base = OTHER; note = 2'-O-methyl-adenosine
  modified_base 16: mod_base = OTHER; note = 2'-Fluoro-guanosine
  modified_base 17: mod_base = OTHER; note = 2'-O-methyl-adenosine
  modified_base 18: mod_base = gm
  modified_base 19: mod_base = cm
  modified_base 20: mod_base = OTHER; note = 2'-O-methyl-adenosine
  modified_base 21: mod_base = gm
  modified_base 21^22: mod_base = OTHER; note = Phosphorothioate bond
  modified_base 22: mod_base = OTHER; note = 2'-O-methyl-adenosine
  modified_base 22^23: mod_base = OTHER; note = Phosphorothioate bond
  modified_base 23: mod_base = gm
actgttgtttacttagagcagag

SEQ ID NO: 443 - RNA, 23 nt, synthetic construct
  source 1..23: mol_type = other RNA
  modified_base 1: mod_base = cm
  modified_base 1^2: mod_base = OTHER; note = Phosphorothioate bond
  modified_base 2: mod_base = OTHER; note = 2'-Fluoro-uridine
  modified_base 2^3: mod_base = OTHER; note = Phosphorothioate bond
  modified_base 3: mod_base = um
  modified_base 4: mod_base = um
  modified_base 5: mod_base = um
  modified_base 6: mod_base = OTHER; note = 2'-Fluoro-adenosine
  modified_base 7: mod_base = OTHER; note = 2'-O-methyl-adenosine
  modified_base 8: mod_base = OTHER; note = 2'-Fluoro-guanosine
  modified_base 9: mod_base = OTHER; note = 2'-Fluoro-guanosine
  modified_base 10: mod_base = cm
  modified_base 11: mod_base = OTHER; note = 2'-O-methyl-adenosine
  modified_base 12: mod_base = cm
  modified_base 13: mod_base = um
  modified_base 14: mod_base = OTHER; note = 2'-Fluoro-uridine
  modified_base 15: mod_base = um
  modified_base 16: mod_base = OTHER; note = 2'-Fluoro-guanosine
  modified_base 17: mod_base = gm
  modified_base 18: mod_base = OTHER; note = 2'-O-methyl-adenosine
  modified_base 19: mod_base = OTHER; note = 2'-O-methyl-adenosine
  modified_base 20: mod_base = OTHER; note = 2'-O-methyl-adenosine
  modified_base 21: mod_base = OTHER; note = 2'-O-methyl-adenosine
  modified_base 21^22: mod_base = OTHER; note = Phosphorothioate bond
  modified_base 22: mod_base = gm
  modified_base 22^23: mod_base = OTHER; note = Phosphorothioate bond
  modified_base 23: mod_base = um
cttttaaggcactttggaaaagt

SEQ ID NO: 444 - RNA, 23 nt, synthetic construct
  source 1..23: mol_type = other RNA
  modified_base 1: mod_base = OTHER; note = 2'-O-methyl-adenosine
  modified_base 1^2: mod_base = OTHER; note = Phosphorothioate bond
  modified_base 2: mod_base = OTHER; note = 2'-Fluoro-cytidine
  modified_base 2^3: mod_base = OTHER; note = Phosphorothioate bond
  modified_base 3: mod_base = cm
  modified_base 4: mod_base = um
  modified_base 5: mod_base = cm
  modified_base 6: mod_base = OTHER; note = 2'-Fluoro-cytidine
  modified_base 7: mod_base = OTHER; note = 2'-O-methyl-adenosine
  modified_base 8: mod_base = OTHER; note = 2'-Fluoro-adenosine
  modified_base 9: mod_base = OTHER; note = 2'-Fluoro-adenosine
  modified_base 10: mod_base = OTHER; note = 2'-O-methyl-adenosine
  modified_base 11: mod_base = um
  modified_base 12: mod_base = OTHER; note = 2'-O-methyl-adenosine
  modified_base 13: mod_base = cm
  modified_base 14: mod_base = OTHER; note = 2'-Fluoro-uridine
  modified_base 15: mod_base = gm
  modified_base 16: mod_base = OTHER; note = 2'-Fluoro-adenosine
  modified_base 17: mod_base = OTHER; note = 2'-O-methyl-adenosine
  modified_base 18: mod_base = cm
  modified_base 19: mod_base = OTHER; note = 2'-O-methyl-adenosine
  modified_base 20: mod_base = um
  modified_base 21: mod_base = OTHER; note = 2'-O-methyl-adenosine
  modified_base 21^22: mod_base = OTHER; note = Phosphorothioate bond
  modified_base 22: mod_base = OTHER; note = 2'-O-methyl-adenosine
  modified_base 22^23: mod_base = OTHER; note = Phosphorothioate bond
  modified_base 23: mod_base = gm
acctccaaaatactgaacataag

SEQ ID NO: 445 - RNA, 23 nt, synthetic construct
  source 1..23: mol_type = other RNA
  modified_base 1: mod_base = cm
  modified_base 1^2: mod_base = OTHER; note = Phosphorothioate bond
  modified_base 2: mod_base = OTHER; note = 2'-Fluoro-guanosine
  modified_base 2^3: mod_base = OTHER; note = Phosphorothioate bond
  modified_base 3: mod_base = gm
  modified_base 4: mod_base = um
  modified_base 5: mod_base = gm
  modified_base 6: mod_base = OTHER; note = 2'-Fluoro-uridine
  modified_base 7: mod_base = cm
  modified_base 8: mod_base = OTHER; note = 2'-Fluoro-cytidine
  modified_base 9: mod_base = OTHER; note = 2'-Fluoro-cytidine
  modified_base 10: mod_base = gm
  modified_base 11: mod_base = OTHER; note = 2'-O-methyl-adenosine
  modified_base 12: mod_base = um
  modified_base 13: mod_base = gm
  modified_base 14: mod_base = OTHER; note = 2'-Fluoro-uridine
  modified_base 15: mod_base = cm
  modified_base 16: mod_base = OTHER; note = 2'-Fluoro-cytidine
  modified_base 17: mod_base = OTHER; note = 2'-O-methyl-adenosine
  modified_base 18: mod_base = cm
  modified_base 19: mod_base = um
  modified_base 20: mod_base = gm
  modified_base 21: mod_base = um
  modified_base 21^22: mod_base = OTHER; note = Phosphorothioate bond
  modified_base 22: mod_base = gm
  modified_base 22^23: mod_base = OTHER; note = Phosphorothioate bond
  modified_base 23: mod_base = OTHER; note = 2'-O-methyl-adenosine
cggtgtcccgatgtccactgtga

SEQ ID NO: 446 - RNA, 23 nt, synthetic construct
  source 1..23: mol_type = other RNA
  modified_base 1: mod_base = cm
  modified_base 1^2: mod_base = OTHER; note = Phosphorothioate bond
  modified_base 2: mod_base = OTHER; note = 2'-Fluoro-cytidine
  modified_base 2^3: mod_base = OTHER; note = Phosphorothioate bond
  modified_base 3: mod_base = cm
  modified_base 4: mod_base = cm
  modified_base 5: mod_base = OTHER; note = 2'-O-methyl-adenosine
  modified_base 6: mod_base = OTHER; note = 2'-Fluoro-adenosine
  modified_base 7: mod_base = um
  modified_base 8: mod_base = OTHER; note = 2'-Fluoro-adenosine
  modified_base 9: mod_base = OTHER; note = 2'-Fluoro-adenosine
  modified_base 10: mod_base = um
  modified_base 11: mod_base = um
  modified_base 12: mod_base = OTHER; note = 2'-O-methyl-adenosine
  modified_base 13: mod_base = um
  modified_base 14: mod_base = OTHER; note = 2'-Fluoro-uridine
  modified_base 15: mod_base = OTHER; note = 2'-O-methyl-adenosine
  modified_base 16: mod_base = OTHER; note = 2'-Fluoro-guanosine
  modified_base 17: mod_base = gm
  modified_base 18: mod_base = OTHER; note = 2'-O-methyl-adenosine
  modified_base 19: mod_base = OTHER; note = 2'-O-methyl-adenosine
  modified_base 20: mod_base = OTHER; note = 2'-O-methyl-adenosine
  modified_base 21: mod_base = um
  modified_base 21^22: mod_base = OTHER; note = Phosphorothioate bond
  modified_base 22: mod_base = cm
  modified_base 22^23: mod_base = OTHER; note = Phosphorothioate bond
  modified_base 23: mod_base = cm
ccccaataattattaggaaatcc

SEQ ID NO: 447 - RNA, 23 nt, synthetic construct
  source 1..23: mol_type = other RNA
  modified_base 1: mod_base = gm
  modified_base 1^2: mod_base = OTHER; note = Phosphorothioate bond
  modified_base 2: mod_base = OTHER; note = 2'-Fluoro-adenosine
  modified_base 2^3: mod_base = OTHER; note = Phosphorothioate bond
  modified_base 3: mod_base = um
  modified_base 4: mod_base = gm
  modified_base 5: mod_base = um
  modified_base 6: mod_base = OTHER; note = 2'-Fluoro-cytidine
  modified_base 7: mod_base = cm
  modified_base 8: mod_base = OTHER; note = 2'-Fluoro-adenosine
  modified_base 9: mod_base = OTHER; note = 2'-Fluoro-cytidine
  modified_base 10: mod_base = um
  modified_base 11: mod_base = gm
  modified_base 12: mod_base = um
  modified_base 13: mod_base = gm
  modified_base 14: mod_base = OTHER; note = 2'-Fluoro-adenosine
  modified_base 15: mod_base = um
  modified_base 16: mod_base = OTHER; note = 2'-Fluoro-uridine
  modified_base 17: mod_base = um
  modified_base 18: mod_base = gm
  modified_base 19: mod_base = gm
  modified_base 20: mod_base = gm
  modified_base 21: mod_base = um
  modified_base 21^22: mod_base = OTHER; note = Phosphorothioate bond
  modified_base 22: mod_base = OTHER; note = 2'-O-methyl-adenosine
  modified_base 22^23: mod_base = OTHER; note = Phosphorothioate bond
  modified_base 23: mod_base = um
gatgtccactgtgatttgggtat

SEQ ID NO: 448 - RNA, 23 nt, synthetic construct
  source 1..23: mol_type = other RNA
  modified_base 1: mod_base = um
  modified_base 1^2: mod_base = OTHER; note = Phosphorothioate bond
  modified_base 2: mod_base = OTHER; note = 2'-Fluoro-adenosine
  modified_base 2^3: mod_base = OTHER; note = Phosphorothioate bond
  modified_base 3: mod_base = gm
  modified_base 4: mod_base = OTHER; note = 2'-O-methyl-adenosine
  modified_base 5: mod_base = gm
  modified_base 6: mod_base = OTHER; note = 2'-Fluoro-cytidine
  modified_base 7: mod_base = OTHER; note = 2'-O-methyl-adenosine
  modified_base 8: mod_base = OTHER; note = 2'-Fluoro-guanosine
  modified_base 9: mod_base = OTHER; note = 2'-Fluoro-adenosine
  modified_base 10: mod_base = gm
  modified_base 11: mod_base = OTHER; note = 2'-O-methyl-adenosine
  modified_base 12: mod_base = cm
  modified_base 13: mod_base = OTHER; note = 2'-O-methyl-adenosine
  modified_base 14: mod_base = OTHER; note = 2'-Fluoro-cytidine
  modified_base 15: mod_base = cm
  modified_base 16: mod_base = OTHER; note = 2'-Fluoro-uridine
  modified_base 17: mod_base = cm
  modified_base 18: mod_base = cm
  modified_base 19: mod_base = OTHER; note = 2'-O-methyl-adenosine
  modified_base 20: mod_base = OTHER; note = 2'-O-methyl-adenosine
  modified_base 21: mod_base = OTHER; note = 2'-O-methyl-adenosine
  modified_base 21^22: mod_base = OTHER; note = Phosphorothioate bond
  modified_base 22: mod_base = OTHER; note = 2'-O-methyl-adenosine
  modified_base 22^23: mod_base = OTHER; note = Phosphorothioate bond
  modified_base 23: mod_base = um
tagagcagagacacctccaaaat

SEQ ID NO: 449 - RNA, 23 nt, synthetic construct
  source 1..23: mol_type = other RNA
  modified_base 1: mod_base = cm
  modified_base 1^2: mod_base = OTHER; note = Phosphorothioate bond
  modified_base 2: mod_base = OTHER; note = 2'-Fluoro-cytidine
  modified_base 2^3: mod_base = OTHER; note = Phosphorothioate bond
  modified_base 3: mod_base = gm
  modified_base 4: mod_base = OTHER; note = 2'-O-methyl-adenosine
  modified_base 5: mod_base = um
  modified_base 6: mod_base = OTHER; note = 2'-Fluoro-guanosine
  modified_base 7: mod_base = um
  modified_base 8: mod_base = OTHER; note = 2'-Fluoro-cytidine
  modified_base 9: mod_base = OTHER; note = 2'-Fluoro-cytidine
  modified_base 10: mod_base = OTHER; note = 2'-O-methyl-adenosine
  modified_base 11: mod_base = cm
  modified_base 12: mod_base = um
  modified_base 13: mod_base = gm
  modified_base 14: mod_base = OTHER; note = 2'-Fluoro-uridine
  modified_base 15: mod_base = gm
  modified_base 16: mod_base = OTHER; note = 2'-Fluoro-adenosine
  modified_base 17: mod_base = um
  modified_base 18: mod_base = um
  modified_base 19: mod_base = um
  modified_base 20: mod_base = gm
  modified_base 21: mod_base = gm
  modified_base 21^22: mod_base = OTHER; note = Phosphorothioate bond
  modified_base 22: mod_base = gm
  modified_base 22^23: mod_base = OTHER; note = Phosphorothioate bond
  modified_base 23: mod_base = um
ccgatgtccactgtgatttgggt

SEQ ID NO: 450 - RNA, 23 nt, synthetic construct
  source 1..23: mol_type = other RNA
  modified_base 1: mod_base = um
  modified_base 1^2: mod_base = OTHER; note = Phosphorothioate bond
  modified_base 2: mod_base = OTHER; note = 2'-Fluoro-cytidine
  modified_base 2^3: mod_base = OTHER; note = Phosphorothioate bond
  modified_base 3: mod_base = um
  modified_base 4: mod_base = um
  modified_base 5: mod_base = um
  modified_base 6: mod_base = OTHER; note = 2'-Fluoro-uridine
  modified_base 7: mod_base = OTHER; note = 2'-O-methyl-adenosine
  modified_base 8: mod_base = OTHER; note = 2'-Fluoro-adenosine
  modified_base 9: mod_base = OTHER; note = 2'-Fluoro-guanosine
  modified_base 10: mod_base = gm
  modified_base 11: mod_base = cm
  modified_base 12: mod_base = OTHER; note = 2'-O-methyl-adenosine
  modified_base 13: mod_base = cm
  modified_base 14: mod_base = OTHER; note = 2'-Fluoro-uridine
  modified_base 15: mod_base = um
  modified_base 16: mod_base = OTHER; note = 2'-Fluoro-uridine
  modified_base 17: mod_base = gm
  modified_base 18: mod_base = gm
  modified_base 19: mod_base = OTHER; note = 2'-O-methyl-adenosine
  modified_base 20: mod_base = OTHER; note = 2'-O-methyl-adenosine
  modified_base 21: mod_base = OTHER; note = 2'-O-methyl-adenosine
  modified_base 21^22: mod_base = OTHER; note = Phosphorothioate bond
  modified_base 22: mod_base = OTHER; note = 2'-O-methyl-adenosine
  modified_base 22^23: mod_base = OTHER; note = Phosphorothioate bond
  modified_base 23: mod_base = gm
tcttttaaggcactttggaaaag

SEQ ID NO: 451 - RNA, 23 nt, synthetic construct
  source 1..23: mol_type = other RNA
  modified_base 1: mod_base = cm
  modified_base 1^2: mod_base = OTHER; note = Phosphorothioate bond
  modified_base 2: mod_base = OTHER; note = 2'-Fluoro-cytidine
  modified_base 2^3: mod_base = OTHER; note = Phosphorothioate bond
  modified_base 3: mod_base = cm
  modified_base 4: mod_base = OTHER; note = 2'-O-methyl-adenosine
  modified_base 5: mod_base = OTHER; note = 2'-O-methyl-adenosine
  modified_base 6: mod_base = OTHER; note = 2'-Fluoro-uridine
  modified_base 7: mod_base = OTHER; note = 2'-O-methyl-adenosine
  modified_base 8: mod_base = OTHER; note = 2'-Fluoro-adenosine
  modified_base 9: mod_base = OTHER; note = 2'-Fluoro-uridine
  modified_base 10: mod_base = um
  modified_base 11: mod_base = OTHER; note = 2'-O-methyl-adenosine
  modified_base 12: mod_base = um
  modified_base 13: mod_base = um
  modified_base 14: mod_base = OTHER; note = 2'-Fluoro-adenosine
  modified_base 15: mod_base = gm
  modified_base 16: mod_base = OTHER; note = 2'-Fluoro-guanosine
  modified_base 17: mod_base = OTHER; note = 2'-O-methyl-adenosine
  modified_base 18: mod_base = OTHER; note = 2'-O-methyl-adenosine
  modified_base 19: mod_base = OTHER; note = 2'-O-methyl-adenosine
  modified_base 20: mod_base = um
  modified_base 21: mod_base = cm
  modified_base 21^22: mod_base = OTHER; note = Phosphorothioate bond
  modified_base 22: mod_base = cm
  modified_base 22^23: mod_base = OTHER; note = Phosphorothioate bond
  modified_base 23: mod_base = OTHER; note = 2'-O-methyl-adenosine
cccaataattattaggaaatcca

SEQ ID NO: 452 - RNA, 23 nt, synthetic construct
  source 1..23: mol_type = other RNA
  modified_base 1: mod_base = gm
  modified_base 1^2: mod_base = OTHER; note = Phosphorothioate bond
  modified_base 2: mod_base = OTHER; note = 2'-Fluoro-uridine
  modified_base 2^3: mod_base = OTHER; note = Phosphorothioate bond
  modified_base 3: mod_base = cm
  modified_base 4: mod_base = cm
  modified_base 5: mod_base = OTHER; note = 2'-O-methyl-adenosine
  modified_base 6: mod_base = OTHER; note = 2'-Fluoro-cytidine
  modified_base 7: mod_base = um
  modified_base 8: mod_base = OTHER; note = 2'-Fluoro-guanosine
  modified_base 9: mod_base = OTHER; note = 2'-Fluoro-uridine
  modified_base 10: mod_base = gm
  modified_base 11: mod_base = OTHER; note = 2'-O-methyl-adenosine
  modified_base 12: mod_base = um
  modified_base 13: mod_base = um
  modified_base 14: mod_base = OTHER; note = 2'-Fluoro-uridine
  modified_base 15: mod_base = gm
  modified_base 16: mod_base = OTHER; note = 2'-Fluoro-guanosine
  modified_base 17: mod_base = gm
  modified_base 18: mod_base = um
  modified_base 19: mod_base = OTHER; note = 2'-O-methyl-adenosine
  modified_base 20: mod_base = um
  modified_base 21: mod_base = OTHER; note = 2'-O-methyl-adenosine
  modified_base 21^22: mod_base = OTHER; note = Phosphorothioate bond
  modified_base 22: mod_base = cm
  modified_base 22^23: mod_base = OTHER; note = Phosphorothioate bond
  modified_base 23: mod_base = OTHER; note = 2'-O-methyl-adenosine
gtccactgtgatttgggtataca

SEQ ID NO: 453 - RNA, 23 nt, synthetic construct
  source 1..23: mol_type = other RNA
  modified_base 1: mod_base = gm
  modified_base 1^2: mod_base = OTHER; note = Phosphorothioate bond
  modified_base 2: mod_base = OTHER; note = 2'-Fluoro-uridine
  modified_base 2^3: mod_base = OTHER; note = Phosphorothioate bond
  modified_base 3: mod_base = OTHER; note = 2'-O-methyl-adenosine
  modified_base 4: mod_base = gm
  modified_base 5: mod_base = gm
  modified_base 6: mod_base = OTHER; note = 2'-Fluoro-uridine
  modified_base 7: mod_base = gm
  modified_base 8: mod_base = OTHER; note = 2'-Fluoro-adenosine
  modified_base 9: mod_base = OTHER; note = 2'-Fluoro-guanosine
  modified_base 10: mod_base = um
  modified_base 11: mod_base = gm
  modified_base 12: mod_base = OTHER; note = 2'-O-methyl-adenosine
  modified_base 13: mod_base = gm
  modified_base 14: mod_base = OTHER; note = 2'-Fluoro-uridine
  modified_base 15: mod_base = um
  modified_base 16: mod_base = OTHER; note = 2'-Fluoro-cytidine
  modified_base 17: mod_base = OTHER; note = 2'-O-methyl-adenosine
  modified_base 18: mod_base = OTHER; note = 2'-O-methyl-adenosine
  modified_base 19: mod_base = OTHER; note = 2'-O-methyl-adenosine
  modified_base 20: mod_base = cm
  modified_base 21: mod_base = cm
  modified_base 21^22: mod_base = OTHER; note = Phosphorothioate bond
  modified_base 22: mod_base = OTHER; note = 2'-O-methyl-adenosine
  modified_base 22^23: mod_base = OTHER; note = Phosphorothioate bond
  modified_base 23: mod_base = um
gtaggtgagtgagttcaaaccat

SEQ ID NO: 454 - RNA, 23 nt, synthetic construct
  source 1..23: mol_type = other RNA
  modified_base 1: mod_base = OTHER; note = 2'-O-methyl-adenosine
  modified_base 1^2: mod_base = OTHER; note = Phosphorothioate bond
  modified_base 2: mod_base = OTHER; note = 2'-Fluoro-cytidine
  modified_base 2^3: mod_base = OTHER; note = Phosphorothioate bond
  modified_base 3: mod_base = um
  modified_base 4: mod_base = um
  modified_base 5: mod_base = OTHER; note = 2'-O-methyl-adenosine
  modified_base 6: mod_base = OTHER; note = 2'-Fluoro-guanosine
  modified_base 7: mod_base = OTHER; note = 2'-O-methyl-adenosine
  modified_base 8: mod_base = OTHER; note = 2'-Fluoro-guanosine
  modified_base 9: mod_base = OTHER; note = 2'-Fluoro-cytidine
  modified_base 10: mod_base = OTHER; note = 2'-O-methyl-adenosine
  modified_base 11: mod_base = gm
  modified_base 12: mod_base = OTHER; note = 2'-O-methyl-adenosine
  modified_base 13: mod_base = gm
  modified_base 14: mod_base = OTHER; note = 2'-Fluoro-adenosine
  modified_base 15: mod_base = cm
  modified_base 16: mod_base = OTHER; note = 2'-Fluoro-adenosine
  modified_base 17: mod_base = cm
  modified_base 18: mod_base = cm
  modified_base 19: mod_base = um
  modified_base 20: mod_base = cm
  modified_base 21: mod_base = cm
  modified_base 21^22: mod_base = OTHER; note = Phosphorothioate bond
  modified_base 22: mod_base = OTHER; note = 2'-O-methyl-adenosine
  modified_base 22^23: mod_base = OTHER; note = Phosphorothioate bond
  modified_base 23: mod_base = OTHER; note = 2'-O-methyl-adenosine
acttagagcagagacacctccaa

SEQ ID NO: 455 - RNA, 23 nt, synthetic construct
  source 1..23: mol_type = other RNA
  modified_base 1: mod_base = cm
  modified_base 1^2: mod_base = OTHER; note = Phosphorothioate bond
  modified_base 2: mod_base = OTHER; note = 2'-Fluoro-adenosine
  modified_base 2^3: mod_base = OTHER; note = Phosphorothioate bond
  modified_base 3: mod_base = cm
  modified_base 4: mod_base = cm
  modified_base 5: mod_base = um
  modified_base 6: mod_base = OTHER; note = 2'-Fluoro-uridine
  modified_base 7: mod_base = gm
  modified_base 8: mod_base = OTHER; note = 2'-Fluoro-uridine
  modified_base 9: mod_base = OTHER; note = 2'-Fluoro-guanosine
  modified_base 10: mod_base = OTHER; note = 2'-O-methyl-adenosine
  modified_base 11: mod_base = gm
  modified_base 12: mod_base = gm
  modified_base 13: mod_base = OTHER; note = 2'-O-methyl-adenosine
  modified_base 14: mod_base = OTHER; note = 2'-Fluoro-guanosine
  modified_base 15: mod_base = OTHER; note = 2'-O-methyl-adenosine
  modified_base 16: mod_base = OTHER; note = 2'-Fluoro-guanosine
  modified_base 17: mod_base = OTHER; note = 2'-O-methyl-adenosine
  modified_base 18: mod_base = cm
  modified_base 19: mod_base = gm
  modified_base 20: mod_base = cm
  modified_base 21: mod_base = OTHER; note = 2'-O-methyl-adenosine
  modified_base 21^22: mod_base = OTHER; note = Phosphorothioate bond
  modified_base 22: mod_base = gm
  modified_base 22^23: mod_base = OTHER; note = Phosphorothioate bond
  modified_base 23: mod_base = um
caccttgtgaggagagacgcagt

SEQ ID NO: 456 - RNA, 23 nt, synthetic construct
  source 1..23: mol_type = other RNA
  modified_base 1: mod_base = OTHER; note = 2'-O-methyl-adenosine
  modified_base 1^2: mod_base = OTHER; note = Phosphorothioate bond
  modified_base 2: mod_base = OTHER; note = 2'-Fluoro-adenosine
  modified_base 2^3: mod_base = OTHER; note = Phosphorothioate bond
  modified_base 3: mod_base = OTHER; note = 2'-O-methyl-adenosine
  modified_base 4: mod_base = OTHER; note = 2'-O-methyl-adenosine
  modified_base 5: mod_base = um
  modified_base 6: mod_base = OTHER; note = 2'-Fluoro-guanosine
  modified_base 7: mod_base = um
  modified_base 8: mod_base = OTHER; note = 2'-Fluoro-cytidine
  modified_base 9: mod_base = OTHER; note = 2'-Fluoro-adenosine
  modified_base 10: mod_base = um
  modified_base 11: mod_base = cm
  modified_base 12: mod_base = OTHER; note = 2'-O-methyl-adenosine
  modified_base 13: mod_base = um
  modified_base 14: mod_base = OTHER; note = 2'-Fluoro-cytidine
  modified_base 15: mod_base = um
  modified_base 16: mod_base = OTHER; note = 2'-Fluoro-uridine
  modified_base 17: mod_base = cm
  modified_base 18: mod_base = um
  modified_base 19: mod_base = cm
  modified_base 20: mod_base = cm
  modified_base 21: mod_base = um
  modified_base 21^22: mod_base = OTHER; note = Phosphorothioate bond
  modified_base 22: mod_base = cm
  modified_base 22^23: mod_base = OTHER; note = Phosphorothioate bond
  modified_base 23: mod_base = cm
aaaatgtcatcatcttctcctcc

SEQ ID NO: 457 - RNA, 23 nt, synthetic construct
  source 1..23: mol_type = other RNA
  modified_base 1: mod_base = cm
  modified_base 1^2: mod_base = OTHER; note = Phosphorothioate bond
  modified_base 2: mod_base = OTHER; note = 2'-Fluoro-uridine
  modified_base 2^3: mod_base = OTHER; note = Phosphorothioate bond
  modified_base 3: mod_base = um
  modified_base 4: mod_base = OTHER; note = 2'-O-methyl-adenosine
  modified_base 5: mod_base = gm
  modified_base 6: mod_base = OTHER; note = 2'-Fluoro-adenosine
  modified_base 7: mod_base = gm
  modified_base 8: mod_base = OTHER; note = 2'-Fluoro-cytidine
  modified_base 9: mod_base = OTHER; note = 2'-Fluoro-adenosine
  modified_base 10: mod_base = gm
  modified_base 11: mod_base = OTHER; note = 2'-O-methyl-adenosine
  modified_base 12: mod_base = gm
  modified_base 13: mod_base = OTHER; note = 2'-O-methyl-adenosine
  modified_base 14: mod_base = OTHER; note = 2'-Fluoro-cytidine
  modified_base 15: mod_base = OTHER; note = 2'-O-methyl-adenosine
  modified_base 16: mod_base = OTHER; note = 2'-Fluoro-cytidine
  modified_base 17: mod_base = cm
  modified_base 18: mod_base = um
  modified_base 19: mod_base = cm
  modified_base 20: mod_base = cm
  modified_base 21: mod_base = OTHER; note = 2'-O-methyl-adenosine
  modified_base 21^22: mod_base = OTHER; note = Phosphorothioate bond
  modified_base 22: mod_base = OTHER; note = 2'-O-methyl-adenosine
  modified_base 22^23: mod_base = OTHER; note = Phosphorothioate bond
  modified_base 23: mod_base = OTHER; note = 2'-O-methyl-adenosine
cttagagcagagacacctccaaa

SEQ ID NO: 458 - RNA, 23 nt, synthetic construct
  source 1..23: mol_type = other RNA
  modified_base 1: mod_base = um
  modified_base 1^2: mod_base = OTHER; note = Phosphorothioate bond
  modified_base 2: mod_base = OTHER; note = 2'-Fluoro-cytidine
  modified_base 2^3: mod_base = OTHER; note = Phosphorothioate bond
  modified_base 3: mod_base = um
  modified_base 4: mod_base = cm
  modified_base 5: mod_base = cm
  modified_base 6: mod_base = OTHER; note = 2'-Fluoro-uridine
  modified_base 7: mod_base = cm
  modified_base 8: mod_base = OTHER; note = 2'-Fluoro-cytidine
  modified_base 9: mod_base = OTHER; note = 2'-Fluoro-cytidine
  modified_base 10: mod_base = cm
  modified_base 11: mod_base = OTHER; note = 2'-O-methyl-adenosine
  modified_base 12: mod_base = gm
  modified_base 13: mod_base = cm
  modified_base 14: mod_base = OTHER; note = 2'-Fluoro-cytidine
  modified_base 15: mod_base = cm
  modified_base 16: mod_base = OTHER; note = 2'-Fluoro-cytidine
  modified_base 17: mod_base = OTHER; note = 2'-O-methyl-adenosine
  modified_base 18: mod_base = OTHER; note = 2'-O-methyl-adenosine
  modified_base 19: mod_base = um
  modified_base 20: mod_base = OTHER; note = 2'-O-methyl-adenosine
  modified_base 21: mod_base = OTHER; note = 2'-O-methyl-adenosine
  modified_base 21^22: mod_base = OTHER; note = Phosphorothioate bond
  modified_base 22: mod_base = um
  modified_base 22^23: mod_base = OTHER; note = Phosphorothioate bond
  modified_base 23: mod_base = um
tctcctccccagccccaataatt

SEQ ID NO: 459 - RNA, 23 nt, synthetic construct
  source 1..23: mol_type = other RNA
  modified_base 1: mod_base = OTHER; note = 2'-O-methyl-adenosine
  modified_base 1^2: mod_base = OTHER; note = Phosphorothioate bond
  modified_base 2: mod_base = OTHER; note = 2'-Fluoro-guanosine
  modified_base 2^3: mod_base = OTHER; note = Phosphorothioate bond
  modified_base 3: mod_base = gm
  modified_base 4: mod_base = cm
  modified_base 5: mod_base = OTHER; note = 2'-O-methyl-adenosine
  modified_base 6: mod_base = OTHER; note = 2'-Fluoro-cytidine
  modified_base 7: mod_base = um
  modified_base 8: mod_base = OTHER; note = 2'-Fluoro-uridine
  modified_base 9: mod_base = OTHER; note = 2'-Fluoro-uridine
  modified_base 10: mod_base = gm
  modified_base 11: mod_base = gm
  modified_base 12: mod_base = OTHER; note = 2'-O-methyl-adenosine
  modified_base 13: mod_base = OTHER; note = 2'-O-methyl-adenosine
  modified_base 14: mod_base = OTHER; note = 2'-Fluoro-adenosine
  modified_base 15: mod_base = OTHER; note = 2'-O-methyl-adenosine
  modified_base 16: mod_base = OTHER; note = 2'-Fluoro-guanosine
  modified_base 17: mod_base = um
  modified_base 18: mod_base = cm
  modified_base 19: mod_base = OTHER; note = 2'-O-methyl-adenosine
  modified_base 20: mod_base = gm
  modified_base 21: mod_base = gm
  modified_base 21^22: mod_base = OTHER; note = Phosphorothioate bond
  modified_base 22: mod_base = OTHER; note = 2'-O-methyl-adenosine
  modified_base 22^23: mod_base = OTHER; note = Phosphorothioate bond
  modified_base 23: mod_base = um
aggcactttggaaaagtcaggat

SEQ ID NO: 460 - RNA, 23 nt, synthetic construct
  source 1..23: mol_type = other RNA
  modified_base 1: mod_base = cm
  modified_base 1^2: mod_base = OTHER; note = Phosphorothioate bond
  modified_base 2: mod_base = OTHER; note = 2'-Fluoro-cytidine
  modified_base 2^3: mod_base = OTHER; note = Phosphorothioate bond
  modified_base 3: mod_base = OTHER; note = 2'-O-methyl-adenosine
  modified_base 4: mod_base = um
  modified_base 5: mod_base = um
  modified_base 6: mod_base = OTHER; note = 2'-Fluoro-guanosine
  modified_base 7: mod_base = cm
  modified_base 8: mod_base = OTHER; note = 2'-Fluoro-adenosine
  modified_base 9: mod_base = OTHER; note = 2'-Fluoro-adenosine
  modified_base 10: mod_base = cm
  modified_base 11: mod_base = gm
  modified_base 12: mod_base = gm
  modified_base 13: mod_base = OTHER; note = 2'-O-methyl-adenosine
  modified_base 14: mod_base = OTHER; note = 2'-Fluoro-adenosine
  modified_base 15: mod_base = OTHER; note = 2'-O-methyl-adenosine
  modified_base 16: mod_base = OTHER; note = 2'-Fluoro-uridine
  modified_base 17: mod_base = gm
  modified_base 18: mod_base = um
  modified_base 19: mod_base = gm
  modified_base 20: mod_base = cm
  modified_base 21: mod_base = cm
  modified_base 21^22: mod_base = OTHER; note = Phosphorothioate bond
  modified_base 22: mod_base = gm
  modified_base 22^23: mod_base = OTHER; note = Phosphorothioate bond
  modified_base 23: mod_base = um
ccattgcaacggaaatgtgccgt

SEQ ID NO: 461 - RNA, 23 nt, synthetic construct
  source 1..23: mol_type = other RNA
  modified_base 1: mod_base = OTHER; note = 2'-O-methyl-adenosine
  modified_base 1^2: mod_base = OTHER; note = Phosphorothioate bond
  modified_base 2: mod_base = OTHER; note = 2'-Fluoro-adenosine
  modified_base 2^3: mod_base = OTHER; note = Phosphorothioate bond
  modified_base 3: mod_base = cm
  modified_base 4: mod_base = um
  modified_base 5: mod_base = gm
  modified_base 6: mod_base = OTHER; note = 2'-Fluoro-uridine
  modified_base 7: mod_base = um
  modified_base 8: mod_base = OTHER; note = 2'-Fluoro-guanosine
  modified_base 9: mod_base = OTHER; note = 2'-Fluoro-uridine
  modified_base 10: mod_base = um
  modified_base 11: mod_base = um
  modified_base 12: mod_base = OTHER; note = 2'-O-methyl-adenosine
  modified_base 13: mod_base = cm
  modified_base 14: mod_base = OTHER; note = 2'-Fluoro-uridine
  modified_base 15: mod_base = um
  modified_base 16: mod_base = OTHER; note = 2'-Fluoro-adenosine
  modified_base 17: mod_base = gm
  modified_base 18: mod_base = OTHER; note = 2'-O-methyl-adenosine
  modified_base 19: mod_base = gm
  modified_base 20: mod_base = cm
  modified_base 21: mod_base = OTHER; note = 2'-O-methyl-adenosine
  modified_base 21^22: mod_base = OTHER; note = Phosphorothioate bond
  modified_base 22: mod_base = gm
  modified_base 22^23: mod_base = OTHER; note = Phosphorothioate bond
  modified_base 23: mod_base = OTHER; note = 2'-O-methyl-adenosine
aactgttgtttacttagagcaga

SEQ ID NO: 462 - RNA, 23 nt, synthetic construct
  source 1..23: mol_type = other RNA
  modified_base 1: mod_base = um
  modified_base 1^2: mod_base = OTHER; note = Phosphorothioate bond
  modified_base 2: mod_base = OTHER; note = 2'-Fluoro-uridine
  modified_base 2^3: mod_base = OTHER; note = Phosphorothioate bond
  modified_base 3: mod_base = OTHER; note = 2'-O-methyl-adenosine
  modified_base 4: mod_base = gm
  modified_base 5: mod_base = OTHER; note = 2'-O-methyl-adenosine
  modified_base 6: mod_base = OTHER; note = 2'-Fluoro-guanosine
  modified_base 7: mod_base = cm
  modified_base 8: mod_base = OTHER; note = 2'-Fluoro-adenosine
  modified_base 9: mod_base = OTHER; note = 2'-Fluoro-guanosine
  modified_base 10: mod_base = OTHER; note = 2'-O-methyl-adenosine
  modified_base 11: mod_base = gm
  modified_base 12: mod_base = OTHER; note = 2'-O-methyl-adenosine
  modified_base 13: mod_base = cm
  modified_base 14: mod_base = OTHER; note = 2'-Fluoro-adenosine
  modified_base 15: mod_base = cm
  modified_base 16: mod_base = OTHER; note = 2'-Fluoro-cytidine
  modified_base 17: mod_base = um
  modified_base 18: mod_base = cm
  modified_base 19: mod_base = cm
  modified_base 20: mod_base = OTHER; note = 2'-O-methyl-adenosine
  modified_base 21: mod_base = OTHER; note = 2'-O-methyl-adenosine
  modified_base 21^22: mod_base = OTHER; note = Phosphorothioate bond
  modified_base 22: mod_base = OTHER; note = 2'-O-methyl-adenosine
  modified_base 22^23: mod_base = OTHER; note = Phosphorothioate bond
  modified_base 23: mod_base = OTHER; note = 2'-O-methyl-adenosine
ttagagcagagacacctccaaaa

SEQ ID NO: 463 - RNA, 23 nt, synthetic construct
  source 1..23: mol_type = other RNA
  modified_base 1: mod_base = gm
  modified_base 1^2: mod_base = OTHER; note = Phosphorothioate bond
  modified_base 2: mod_base = OTHER; note = 2'-Fluoro-adenosine
  modified_base 2^3: mod_base = OTHER; note = Phosphorothioate bond
  modified_base 3: mod_base = OTHER; note = 2'-O-methyl-adenosine
  modified_base 4: mod_base = OTHER; note = 2'-O-methyl-adenosine
  modified_base 5: mod_base = um
  modified_base 6: mod_base = OTHER; note = 2'-Fluoro-uridine
  modified_base 7: mod_base = cm
  modified_base 8: mod_base = OTHER; note = 2'-Fluoro-adenosine
  modified_base 9: mod_base = OTHER; note = 2'-Fluoro-adenosine
  modified_base 10: mod_base = gm
  modified_base 11: mod_base = um
  modified_base 12: mod_base = um
  modified_base 13: mod_base = um
  modified_base 14: mod_base = OTHER; note = 2'-Fluoro-adenosine
  modified_base 15: mod_base = cm
  modified_base 16: mod_base = OTHER; note = 2'-Fluoro-adenosine
  modified_base 17: mod_base = um
  modified_base 18: mod_base = OTHER; note = 2'-O-methyl-adenosine
  modified_base 19: mod_base = gm
  modified_base 20: mod_base = cm
  modified_base 21: mod_base = OTHER; note = 2'-O-methyl-adenosine
  modified_base 21^22: mod_base = OTHER; note = Phosphorothioate bond
  modified_base 22: mod_base = um
  modified_base 22^23: mod_base = OTHER; note = Phosphorothioate bond
  modified_base 23: mod_base = gm
gaaattcaagtttacatagcatg

SEQ ID NO: 464 - RNA, 23 nt, synthetic construct
  source 1..23: mol_type = other RNA
  modified_base 1: mod_base = cm
  modified_base 1^2: mod_base = OTHER; note = Phosphorothioate bond
  modified_base 2: mod_base = OTHER; note = 2'-Fluoro-adenosine
  modified_base 2^3: mod_base = OTHER; note = Phosphorothioate bond
  modified_base 3: mod_base = OTHER; note = 2'-O-methyl-adenosine
  modified_base 4: mod_base = um
  modified_base 5: mod_base = OTHER; note = 2'-O-methyl-adenosine
  modified_base 6: mod_base = OTHER; note = 2'-Fluoro-adenosine
  modified_base 7: mod_base = um
  modified_base 8: mod_base = OTHER; note = 2'-Fluoro-uridine
  modified_base 9: mod_base = OTHER; note = 2'-Fluoro-adenosine
  modified_base 10: mod_base = um
  modified_base 11: mod_base = um
  modified_base 12: mod_base = OTHER; note = 2'-O-methyl-adenosine
  modified_base 13: mod_base = gm
  modified_base 14: mod_base = OTHER; note = 2'-Fluoro-guanosine
  modified_base 15: mod_base = OTHER; note = 2'-O-methyl-adenosine
  modified_base 16: mod_base = OTHER; note = 2'-Fluoro-adenosine
  modified_base 17: mod_base = OTHER; note = 2'-O-methyl-adenosine
  modified_base 18: mod_base = um
  modified_base 19: mod_base = cm
  modified_base 20: mod_base = cm
  modified_base 21: mod_base = OTHER; note = 2'-O-methyl-adenosine
  modified_base 21^22: mod_base = OTHER; note = Phosphorothioate bond
  modified_base 22: mod_base = um
  modified_base 22^23: mod_base = OTHER; note = Phosphorothioate bond
  modified_base 23: mod_base = um
caataattattaggaaatccatt

SEQ ID NO: 465 - RNA, 23 nt, synthetic construct
  source 1..23: mol_type = other RNA
  modified_base 1: mod_base = cm
  modified_base 1^2: mod_base = OTHER; note = Phosphorothioate bond
  modified_base 2: mod_base = OTHER; note = 2'-Fluoro-uridine
  modified_base 2^3: mod_base = OTHER; note = Phosphorothioate bond
  modified_base 3: mod_base = cm
  modified_base 4: mod_base = cm
  modified_base 5: mod_base = um
  modified_base 6: mod_base = OTHER; note = 2'-Fluoro-cytidine
  modified_base 7: mod_base = cm
  modified_base 8: mod_base = OTHER; note = 2'-Fluoro-cytidine
  modified_base 9: mod_base = OTHER; note = 2'-Fluoro-cytidine
  modified_base 10: mod_base = OTHER; note = 2'-O-methyl-adenosine
  modified_base 11: mod_base = gm
  modified_base 12: mod_base = cm
  modified_base 13: mod_base = cm
  modified_base 14: mod_base = OTHER; note = 2'-Fluoro-cytidine
  modified_base 15: mod_base = cm
  modified_base 16: mod_base = OTHER; note = 2'-Fluoro-adenosine
  modified_base 17: mod_base = OTHER; note = 2'-O-methyl-adenosine
  modified_base 18: mod_base = um
  modified_base 19: mod_base = OTHER; note = 2'-O-methyl-adenosine
  modified_base 20: mod_base = OTHER; note = 2'-O-methyl-adenosine
  modified_base 21: mod_base = um
  modified_base 21^22: mod_base = OTHER; note = Phosphorothioate bond
  modified_base 22: mod_base = um
  modified_base 22^23: mod_base = OTHER; note = Phosphorothioate bond
  modified_base 23: mod_base = OTHER; note = 2'-O-methyl-adenosine
ctcctccccagccccaataatta

SEQ ID NO: 466 - RNA, 23 nt, synthetic construct
  source 1..23: mol_type = other RNA
  modified_base 1: mod_base = um
  modified_base 1^2: mod_base = OTHER; note = Phosphorothioate bond
  modified_base 2: mod_base = OTHER; note = 2'-Fluoro-uridine
  modified_base 2^3: mod_base = OTHER; note = Phosphorothioate bond
  modified_base 3: mod_base = um
  modified_base 4: mod_base = um
  modified_base 5: mod_base = OTHER; note = 2'-O-methyl-adenosine
  modified_base 6: mod_base = OTHER; note = 2'-Fluoro-adenosine
  modified_base 7: mod_base = gm
  modified_base 8: mod_base = OTHER; note = 2'-Fluoro-guanosine
  modified_base 9: mod_base = OTHER; note = 2'-Fluoro-cytidine
  modified_base 10: mod_base = OTHER; note = 2'-O-methyl-adenosine
  modified_base 11: mod_base = cm
  modified_base 12: mod_base = um
  modified_base 13: mod_base = um
  modified_base 14: mod_base = OTHER; note = 2'-Fluoro-uridine
  modified_base 15: mod_base = gm
  modified_base 16: mod_base = OTHER; note = 2'-Fluoro-guanosine
  modified_base 17: mod_base = OTHER; note = 2'-O-methyl-adenosine
  modified_base 18: mod_base = OTHER; note = 2'-O-methyl-adenosine
  modified_base 19: mod_base = OTHER; note = 2'-O-methyl-adenosine
  modified_base 20: mod_base = OTHER; note = 2'-O-methyl-adenosine
  modified_base 21: mod_base = gm
  modified_base 21^22: mod_base = OTHER; note = Phosphorothioate bond
  modified_base 22: mod_base = um
  modified_base 22^23: mod_base = OTHER; note = Phosphorothioate bond
  modified_base 23: mod_base = cm
ttttaaggcactttggaaaagtc

SEQ ID NO: 467 - RNA, 23 nt, synthetic construct
  source 1..23: mol_type = other RNA
  modified_base 1: mod_base = um
  modified_base 1^2: mod_base = OTHER; note = Phosphorothioate bond
  modified_base 2: mod_base = OTHER; note = 2'-Fluoro-uridine
  modified_base 2^3: mod_base = OTHER; note = Phosphorothioate bond
  modified_base 3: mod_base = cm
  modified_base 4: mod_base = um
  modified_base 5: mod_base = cm
  modified_base 6: mod_base = OTHER; note = 2'-Fluoro-cytidine
  modified_base 7: mod_base = um
  modified_base 8: mod_base = OTHER; note = 2'-Fluoro-cytidine
  modified_base 9: mod_base = OTHER; note = 2'-Fluoro-cytidine
  modified_base 10: mod_base = cm
  modified_base 11: mod_base = cm
  modified_base 12: mod_base = OTHER; note = 2'-O-methyl-adenosine
  modified_base 13: mod_base = gm
  modified_base 14: mod_base = OTHER; note = 2'-Fluoro-cytidine
  modified_base 15: mod_base = cm
  modified_base 16: mod_base = OTHER; note = 2'-Fluoro-cytidine
  modified_base 17: mod_base = cm
  modified_base 18: mod_base = OTHER; note = 2'-O-methyl-adenosine
  modified_base 19: mod_base = OTHER; note = 2'-O-methyl-adenosine
  modified_base 20: mod_base = um
  modified_base 21: mod_base = OTHER; note = 2'-O-methyl-adenosine
  modified_base 21^22: mod_base = OTHER; note = Phosphorothioate bond
  modified_base 22: mod_base = OTHER; note = 2'-O-methyl-adenosine
  modified_base 22^23: mod_base = OTHER; note = Phosphorothioate bond
  modified_base 23: mod_base = um
ttctcctccccagccccaataat

SEQ ID NO: 468 - RNA, 23 nt, synthetic construct
  source 1..23: mol_type = other RNA
  modified_base 1: mod_base = cm
  modified_base 1^2: mod_base = OTHER; note = Phosphorothioate bond
  modified_base 2: mod_base = OTHER; note = 2'-Fluoro-uridine
  modified_base 2^3: mod_base = OTHER; note = Phosphorothioate bond
  modified_base 3: mod_base = OTHER; note = 2'-O-methyl-adenosine
  modified_base 4: mod_base = gm
  modified_base 5: mod_base = cm
  modified_base 6: mod_base = OTHER; note = 2'-Fluoro-uridine
  modified_base 7: mod_base = cm
  modified_base 8: mod_base = OTHER; note = 2'-Fluoro-guanosine
  modified_base 9: mod_base = OTHER; note = 2'-Fluoro-guanosine
  modified_base 10: mod_base = um
  modified_base 11: mod_base = gm
  modified_base 12: mod_base = um
  modified_base 13: mod_base = cm
  modified_base 14: mod_base = OTHER; note = 2'-Fluoro-cytidine
  modified_base 15: mod_base = cm
  modified_base 16: mod_base = OTHER; note = 2'-Fluoro-guanosine
  modified_base 17: mod_base = OTHER; note = 2'-O-methyl-adenosine
  modified_base 18: mod_base = um
  modified_base 19: mod_base = gm
  modified_base 20: mod_base = um
  modified_base 21: mod_base = cm
  modified_base 21^22: mod_base = OTHER; note = Phosphorothioate bond
  modified_base 22: mod_base = cm
  modified_base 22^23: mod_base = OTHER; note = Phosphorothioate bond
  modified_base 23: mod_base = OTHER; note = 2'-O-methyl-adenosine
ctagctcggtgtcccgatgtcca

SEQ ID NO: 469 - RNA, 23 nt, synthetic construct
  source 1..23: mol_type = other RNA
  modified_base 1: mod_base = OTHER; note = 2'-O-methyl-adenosine
  modified_base 1^2: mod_base = OTHER; note = Phosphorothioate bond
  modified_base 2: mod_base = OTHER; note = 2'-Fluoro-guanosine
  modified_base 2^3: mod_base = OTHER; note = Phosphorothioate bond
  modified_base 3: mod_base = OTHER; note = 2'-O-methyl-adenosine
  modified_base 4: mod_base = cm
  modified_base 5: mod_base = OTHER; note = 2'-O-methyl-adenosine
  modified_base 6: mod_base = OTHER; note = 2'-Fluoro-cytidine
  modified_base 7: mod_base = cm
  modified_base 8: mod_base = OTHER; note = 2'-Fluoro-uridine
  modified_base 9: mod_base = OTHER; note = 2'-Fluoro-cytidine
  modified_base 10: mod_base = cm
  modified_base 11: mod_base = OTHER; note = 2'-O-methyl-adenosine
  modified_base 12: mod_base = OTHER; note = 2'-O-methyl-adenosine
  modified_base 13: mod_base = OTHER; note = 2'-O-methyl-adenosine
  modified_base 14: mod_base = OTHER; note = 2'-Fluoro-adenosine
  modified_base 15: mod_base = um
  modified_base 16: mod_base = OTHER; note = 2'-Fluoro-adenosine
  modified_base 17: mod_base = cm
  modified_base 18: mod_base = um
  modified_base 19: mod_base = gm
  modified_base 20: mod_base = OTHER; note = 2'-O-methyl-adenosine
  modified_base 21: mod_base = OTHER; note = 2'-O-methyl-adenosine
  modified_base 21^22: mod_base = OTHER; note = Phosphorothioate bond
  modified_base 22: mod_base = cm
  modified_base 22^23: mod_base = OTHER; note = Phosphorothioate bond
  modified_base 23: mod_base = OTHER; note = 2'-O-methyl-adenosine
agacacctccaaaatactgaaca

SEQ ID NO: 470 - RNA, 23 nt, synthetic construct
  source 1..23: mol_type = other RNA
  modified_base 1: mod_base = um
  modified_base 1^2: mod_base = OTHER; note = Phosphorothioate bond
  modified_base 2: mod_base = OTHER; note = 2'-Fluoro-adenosine
  modified_base 2^3: mod_base = OTHER; note = Phosphorothioate bond
  modified_base 3: mod_base = cm
  modified_base 4: mod_base = um
  modified_base 5: mod_base = um
  modified_base 6: mod_base = OTHER; note = 2'-Fluoro-adenosine
  modified_base 7: mod_base = gm
  modified_base 8: mod_base = OTHER; note = 2'-Fluoro-adenosine
  modified_base 9: mod_base = OTHER; note = 2'-Fluoro-guanosine
  modified_base 10: mod_base = cm
  modified_base 11: mod_base = OTHER; note = 2'-O-methyl-adenosine
  modified_base 12: mod_base = gm
  modified_base 13: mod_base = OTHER; note = 2'-O-methyl-adenosine
  modified_base 14: mod_base = OTHER; note = 2'-Fluoro-guanosine
  modified_base 15: mod_base = OTHER; note = 2'-O-methyl-adenosine
  modified_base 16: mod_base = OTHER; note = 2'-Fluoro-cytidine
  modified_base 17: mod_base = OTHER; note = 2'-O-methyl-adenosine
  modified_base 18: mod_base = cm
  modified_base 19: mod_base = cm
  modified_base 20: mod_base = um
  modified_base 21: mod_base = cm
  modified_base 21^22: mod_base = OTHER; note = Phosphorothioate bond
  modified_base 22: mod_base = cm
  modified_base 22^23: mod_base = OTHER; note = Phosphorothioate bond
  modified_base 23: mod_base = OTHER; note = 2'-O-methyl-adenosine
tacttagagcagagacacctcca

SEQ ID NO: 471 - RNA, 23 nt, synthetic construct
  source 1..23: mol_type = other RNA
  modified_base 1: mod_base = um
  modified_base 1^2: mod_base = OTHER; note = Phosphorothioate bond
  modified_base 2: mod_base = OTHER; note = 2'-Fluoro-adenosine
  modified_base 2^3: mod_base = OTHER; note = Phosphorothioate bond
  modified_base 3: mod_base = gm
  modified_base 4: mod_base = gm
  modified_base 5: mod_base = um
  modified_base 6: mod_base = OTHER; note = 2'-Fluoro-guanosine
  modified_base 7: mod_base = OTHER; note = 2'-O-methyl-adenosine
  modified_base 8: mod_base = OTHER; note = 2'-Fluoro-guanosine
  modified_base 9: mod_base = OTHER; note = 2'-Fluoro-uridine
  modified_base 10: mod_base = gm
  modified_base 11: mod_base = OTHER; note = 2'-O-methyl-adenosine
  modified_base 12: mod_base = gm
  modified_base 13: mod_base = um
  modified_base 14: mod_base = OTHER; note = 2'-Fluoro-uridine
  modified_base 15: mod_base = cm
  modified_base 16: mod_base = OTHER; note = 2'-Fluoro-adenosine
  modified_base 17: mod_base = OTHER; note = 2'-O-methyl-adenosine
  modified_base 18: mod_base = OTHER; note = 2'-O-methyl-adenosine
  modified_base 19: mod_base = cm
  modified_base 20: mod_base = cm
  modified_base 21: mod_base = OTHER; note = 2'-O-methyl-adenosine
  modified_base 21^22: mod_base = OTHER; note = Phosphorothioate bond
  modified_base 22: mod_base = um
  modified_base 22^23: mod_base = OTHER; note = Phosphorothioate bond
  modified_base 23: mod_base = cm
taggtgagtgagttcaaaccatc

SEQ ID NO: 472 - RNA, 23 nt, synthetic construct
  source 1..23: mol_type = other RNA
  modified_base 1: mod_base = OTHER; note = 2'-O-methyl-adenosine
  modified_base 1^2: mod_base = OTHER; note = Phosphorothioate bond
  modified_base 2: mod_base = OTHER; note = 2'-Fluoro-cytidine
  modified_base 2^3: mod_base = OTHER; note = Phosphorothioate bond
  modified_base 3: mod_base = um
  modified_base 4: mod_base = um
  modified_base 5: mod_base = um
  modified_base 6: mod_base = OTHER; note = 2'-Fluoro-adenosine
  modified_base 7: mod_base = cm
  modified_base 8: mod_base = OTHER; note = 2'-Fluoro-adenosine
  modified_base 9: mod_base = OTHER; note = 2'-Fluoro-uridine
  modified_base 10: mod_base = um
  modified_base 11: mod_base = cm
  modified_base 12: mod_base = OTHER; note = 2'-O-methyl-adenosine
  modified_base 13: mod_base = gm
  modified_base 14: mod_base = OTHER; note = 2'-Fluoro-adenosine
  modified_base 15: mod_base = OTHER; note = 2'-O-methyl-adenosine
  modified_base 16: mod_base = OTHER; note = 2'-Fluoro-adenosine
  modified_base 17: mod_base = um
  modified_base 18: mod_base = cm
  modified_base 19: mod_base = OTHER; note = 2'-O-methyl-adenosine
  modified_base 20: mod_base = gm
  modified_base 21: mod_base = OTHER; note = 2'-O-methyl-adenosine
  modified_base 21^22: mod_base = OTHER; note = Phosphorothioate bond
  modified_base 22: mod_base = cm
  modified_base 22^23: mod_base = OTHER; note = Phosphorothioate bond
  modified_base 23: mod_base = OTHER; note = 2'-O-methyl-adenosine
actttacattcagaaatcagaca

SEQ ID NO: 473 - RNA, 23 nt, synthetic construct
  source 1..23: mol_type = other RNA
  modified_base 1: mod_base = cm
  modified_base 1^2: mod_base = OTHER; note = Phosphorothioate bond
  modified_base 2: mod_base = OTHER; note = 2'-Fluoro-adenosine
  modified_base 2^3: mod_base = OTHER; note = Phosphorothioate bond
  modified_base 3: mod_base = um
  modified_base 4: mod_base = OTHER; note = 2'-O-methyl-adenosine
  modified_base 5: mod_base = gm
  modified_base 6: mod_base = OTHER; note = 2'-Fluoro-guanosine
  modified_base 7: mod_base = OTHER; note = 2'-O-methyl-adenosine
  modified_base 8: mod_base = OTHER; note = 2'-Fluoro-adenosine
  modified_base 9: mod_base = OTHER; note = 2'-Fluoro-adenosine
  modified_base 10: mod_base = um
  modified_base 11: mod_base = um
  modified_base 12: mod_base = cm
  modified_base 13: mod_base = OTHER; note = 2'-O-methyl-adenosine
  modified_base 14: mod_base = OTHER; note = 2'-Fluoro-adenosine
  modified_base 15: mod_base = gm
  modified_base 16: mod_base = OTHER; note = 2'-Fluoro-uridine
  modified_base 17: mod_base = um
  modified_base 18: mod_base = um
  modified_base 19: mod_base = OTHER; note = 2'-O-methyl-adenosine
  modified_base 20: mod_base = cm
  modified_base 21: mod_base = OTHER; note = 2'-O-methyl-adenosine
  modified_base 21^22: mod_base = OTHER; note = Phosphorothioate bond
  modified_base 22: mod_base = um
  modified_base 22^23: mod_base = OTHER; note = Phosphorothioate bond
  modified_base 23: mod_base = OTHER; note = 2'-O-methyl-adenosine
cataggaaattcaagtttacata

SEQ ID NO: 474 - RNA, 23 nt, synthetic construct
  source 1..23: mol_type = other RNA
  modified_base 1: mod_base = gm
  modified_base 1^2: mod_base = OTHER; note = Phosphorothioate bond
  modified_base 2: mod_base = OTHER; note = 2'-Fluoro-uridine
  modified_base 2^3: mod_base = OTHER; note = Phosphorothioate bond
  modified_base 3: mod_base = um
  modified_base 4: mod_base = um
  modified_base 5: mod_base = OTHER; note = 2'-O-methyl-adenosine
  modified_base 6: mod_base = OTHER; note = 2'-Fluoro-cytidine
  modified_base 7: mod_base = um
  modified_base 8: mod_base = OTHER; note = 2'-Fluoro-uridine
  modified_base 9: mod_base = OTHER; note = 2'-Fluoro-adenosine
  modified_base 10: mod_base = gm
  modified_base 11: mod_base = OTHER; note = 2'-O-methyl-adenosine
  modified_base 12: mod_base = gm
  modified_base 13: mod_base = cm
  modified_base 14: mod_base = OTHER; note = 2'-Fluoro-adenosine
  modified_base 15: mod_base = gm
  modified_base 16: mod_base = OTHER; note = 2'-Fluoro-adenosine
  modified_base 17: mod_base = gm
  modified_base 18: mod_base = OTHER; note = 2'-O-methyl-adenosine
  modified_base 19: mod_base = cm
  modified_base 20: mod_base = OTHER; note = 2'-O-methyl-adenosine
  modified_base 21: mod_base = cm
  modified_base 21^22: mod_base = OTHER; note = Phosphorothioate bond
  modified_base 22: mod_base = cm
  modified_base 22^23: mod_base = OTHER; note = Phosphorothioate bond
  modified_base 23: mod_base = um
gtttacttagagcagagacacct

SEQ ID NO: 475 - RNA, 23 nt, synthetic construct
  source 1..23: mol_type = other RNA
  modified_base 1: mod_base = OTHER; note = 2'-O-methyl-adenosine
  modified_base 1^2: mod_base = OTHER; note = Phosphorothioate bond
  modified_base 2: mod_base = OTHER; note = 2'-Fluoro-cytidine
  modified_base 2^3: mod_base = OTHER; note = Phosphorothioate bond
  modified_base 3: mod_base = cm
  modified_base 4: mod_base = um
  modified_base 5: mod_base = um
  modified_base 6: mod_base = OTHER; note = 2'-Fluoro-guanosine
  modified_base 7: mod_base = um
  modified_base 8: mod_base = OTHER; note = 2'-Fluoro-guanosine
  modified_base 9: mod_base = OTHER; note = 2'-Fluoro-adenosine
  modified_base 10: mod_base = gm
  modified_base 11: mod_base = gm
  modified_base 12: mod_base = OTHER; note = 2'-O-methyl-adenosine
  modified_base 13: mod_base = gm
  modified_base 14: mod_base = OTHER; note = 2'-Fluoro-adenosine
  modified_base 15: mod_base = gm
  modified_base 16: mod_base = OTHER; note = 2'-Fluoro-adenosine
  modified_base 17: mod_base = cm
  modified_base 18: mod_base = gm
  modified_base 19: mod_base = cm
  modified_base 20: mod_base = OTHER; note = 2'-O-methyl-adenosine
  modified_base 21: mod_base = gm
  modified_base 21^22: mod_base = OTHER; note = Phosphorothioate bond
  modified_base 22: mod_base = um
  modified_base 22^23: mod_base = OTHER; note = Phosphorothioate bond
  modified_base 23: mod_base = cm
accttgtgaggagagacgcagtc

SEQ ID NO: 476 - RNA, 23 nt, synthetic construct
  source 1..23: mol_type = other RNA
  modified_base 1: mod_base = cm
  modified_base 1^2: mod_base = OTHER; note = Phosphorothioate bond
  modified_base 2: mod_base = OTHER; note = 2'-Fluoro-cytidine
  modified_base 2^3: mod_base = OTHER; note = Phosphorothioate bond
  modified_base 3: mod_base = um
  modified_base 4: mod_base = cm
  modified_base 5: mod_base = cm
  modified_base 6: mod_base = OTHER; note = 2'-Fluoro-adenosine
  modified_base 7: mod_base = OTHER; note = 2'-O-methyl-adenosine
  modified_base 8: mod_base = OTHER; note = 2'-Fluoro-adenosine
  modified_base 9: mod_base = OTHER; note = 2'-Fluoro-adenosine
  modified_base 10: mod_base = um
  modified_base 11: mod_base = OTHER; note = 2'-O-methyl-adenosine
  modified_base 12: mod_base = cm
  modified_base 13: mod_base = um
  modified_base 14: mod_base = OTHER; note = 2'-Fluoro-guanosine
  modified_base 15: mod_base = OTHER; note = 2'-O-methyl-adenosine
  modified_base 16: mod_base = OTHER; note = 2'-Fluoro-adenosine
  modified_base 17: mod_base = cm
  modified_base 18: mod_base = OTHER; note = 2'-O-methyl-adenosine
  modified_base 19: mod_base = um
  modified_base 20: mod_base = OTHER; note = 2'-O-methyl-adenosine
  modified_base 21: mod_base = OTHER; note = 2'-O-methyl-adenosine
  modified_base 21^22: mod_base = OTHER; note = Phosphorothioate bond
  modified_base 22: mod_base = gm
  modified_base 22^23: mod_base = OTHER; note = Phosphorothioate bond
  modified_base 23: mod_base = gm
cctccaaaatactgaacataagg

SEQ ID NO: 477 - RNA, 23 nt, synthetic construct
  source 1..23: mol_type = other RNA
  modified_base 1: mod_base = gm
  modified_base 1^2: mod_base = OTHER; note = Phosphorothioate bond
  modified_base 2: mod_base = OTHER; note = 2'-Fluoro-guanosine
  modified_base 2^3: mod_base = OTHER; note = Phosphorothioate bond
  modified_base 3: mod_base = um
  modified_base 4: mod_base = gm
  modified_base 5: mod_base = um
  modified_base 6: mod_base = OTHER; note = 2'-Fluoro-cytidine
  modified_base 7: mod_base = cm
  modified_base 8: mod_base = OTHER; note = 2'-Fluoro-cytidine
  modified_base 9: mod_base = OTHER; note = 2'-Fluoro-guanosine
  modified_base 10: mod_base = OTHER; note = 2'-O-methyl-adenosine
  modified_base 11: mod_base = um
  modified_base 12: mod_base = gm
  modified_base 13: mod_base = um
  modified_base 14: mod_base = OTHER; note = 2'-Fluoro-cytidine
  modified_base 15: mod_base = cm
  modified_base 16: mod_base = OTHER; note = 2'-Fluoro-adenosine
  modified_base 17: mod_base = cm
  modified_base 18: mod_base = um
  modified_base 19: mod_base = gm
  modified_base 20: mod_base = um
  modified_base 21: mod_base = gm
  modified_base 21^22: mod_base = OTHER; note = Phosphorothioate bond
  modified_base 22: mod_base = OTHER; note = 2'-O-methyl-adenosine
  modified_base 22^23: mod_base = OTHER; note = Phosphorothioate bond
  modified_base 23: mod_base = um
ggtgtcccgatgtccactgtgat

SEQ ID NO: 478 - RNA, 23 nt, synthetic construct
  source 1..23: mol_type = other RNA
  modified_base 1: mod_base = cm
  modified_base 1^2: mod_base = OTHER; note = Phosphorothioate bond
  modified_base 2: mod_base = OTHER; note = 2'-Fluoro-uridine
  modified_base 2^3: mod_base = OTHER; note = Phosphorothioate bond
  modified_base 3: mod_base = gm
  modified_base 4: mod_base = um
  modified_base 5: mod_base = um
  modified_base 6: mod_base = OTHER; note = 2'-Fluoro-guanosine
  modified_base 7: mod_base = um
  modified_base 8: mod_base = OTHER; note = 2'-Fluoro-uridine
  modified_base 9: mod_base = OTHER; note = 2'-Fluoro-uridine
  modified_base 10: mod_base = OTHER; note = 2'-O-methyl-adenosine
  modified_base 11: mod_base = cm
  modified_base 12: mod_base = um
  modified_base 13: mod_base = um
  modified_base 14: mod_base = OTHER; note = 2'-Fluoro-adenosine
  modified_base 15: mod_base = gm
  modified_base 16: mod_base = OTHER; note = 2'-Fluoro-adenosine
  modified_base 17: mod_base = gm
  modified_base 18: mod_base = cm
  modified_base 19: mod_base = OTHER; note = 2'-O-methyl-adenosine
  modified_base 20: mod_base = gm
  modified_base 21: mod_base = OTHER; note = 2'-O-methyl-adenosine
  modified_base 21^22: mod_base = OTHER; note = Phosphorothioate bond
  modified_base 22: mod_base = gm
  modified_base 22^23: mod_base = OTHER; note = Phosphorothioate bond
  modified_base 23: mod_base = OTHER; note = 2'-O-methyl-adenosine
ctgttgtttacttagagcagaga

SEQ ID NO: 479 - RNA, 23 nt, synthetic construct
  source 1..23: mol_type = other RNA
  modified_base 1: mod_base = cm
  modified_base 1^2: mod_base = OTHER; note = Phosphorothioate bond
  modified_base 2: mod_base = OTHER; note = 2'-Fluoro-adenosine
  modified_base 2^3: mod_base = OTHER; note = Phosphorothioate bond
  modified_base 3: mod_base = um
  modified_base 4: mod_base = um
  modified_base 5: mod_base = gm
  modified_base 6: mod_base = OTHER; note = 2'-Fluoro-cytidine
  modified_base 7: mod_base = OTHER; note = 2'-O-methyl-adenosine
  modified_base 8: mod_base = OTHER; note = 2'-Fluoro-adenosine
  modified_base 9: mod_base = OTHER; note = 2'-Fluoro-cytidine
  modified_base 10: mod_base = gm
  modified_base 11: mod_base = gm
  modified_base 12: mod_base = OTHER; note = 2'-O-methyl-adenosine
  modified_base 13: mod_base = OTHER; note = 2'-O-methyl-adenosine
  modified_base 14: mod_base = OTHER; note = 2'-Fluoro-adenosine
  modified_base 15: mod_base = um
  modified_base 16: mod_base = OTHER; note = 2'-Fluoro-guanosine
  modified_base 17: mod_base = um
  modified_base 18: mod_base = gm
  modified_base 19: mod_base = cm
  modified_base 20: mod_base = cm
  modified_base 21: mod_base = gm
  modified_base 21^22: mod_base = OTHER; note = Phosphorothioate bond
  modified_base 22: mod_base = um
  modified_base 22^23: mod_base = OTHER; note = Phosphorothioate bond
  modified_base 23: mod_base = gm
cattgcaacggaaatgtgccgtg

SEQ ID NO: 480 - RNA, 23 nt, synthetic construct
  source 1..23: mol_type = other RNA
  modified_base 1: mod_base = gm
  modified_base 1^2: mod_base = OTHER; note = Phosphorothioate bond
  modified_base 2: mod_base = OTHER; note = 2'-Fluoro-adenosine
  modified_base 2^3: mod_base = OTHER; note = Phosphorothioate bond
  modified_base 3: mod_base = gm
  modified_base 4: mod_base = OTHER; note = 2'-O-methyl-adenosine
  modified_base 5: mod_base = cm
  modified_base 6: mod_base = OTHER; note = 2'-Fluoro-adenosine
  modified_base 7: mod_base = cm
  modified_base 8: mod_base = OTHER; note = 2'-Fluoro-cytidine
  modified_base 9: mod_base = OTHER; note = 2'-Fluoro-uridine
  modified_base 10: mod_base = cm
  modified_base 11: mod_base = cm
  modified_base 12: mod_base = OTHER; note = 2'-O-methyl-adenosine
  modified_base 13: mod_base = OTHER; note = 2'-O-methyl-adenosine
  modified_base 14: mod_base = OTHER; note = 2'-Fluoro-adenosine
  modified_base 15: mod_base = OTHER; note = 2'-O-methyl-adenosine
  modified_base 16: mod_base = OTHER; note = 2'-Fluoro-uridine
  modified_base 17: mod_base = OTHER; note = 2'-O-methyl-adenosine
  modified_base 18: mod_base = cm
  modified_base 19: mod_base = um
  modified_base 20: mod_base = gm
  modified_base 21: mod_base = OTHER; note = 2'-O-methyl-adenosine
  modified_base 21^22: mod_base = OTHER; note = Phosphorothioate bond
  modified_base 22: mod_base = OTHER; note = 2'-O-methyl-adenosine
  modified_base 22^23: mod_base = OTHER; note = Phosphorothioate bond
  modified_base 23: mod_base = cm
gagacacctccaaaatactgaac

SEQ ID NO: 481 - RNA, 23 nt, synthetic construct
  source 1..23: mol_type = other RNA
  modified_base 1: mod_base = um
  modified_base 1^2: mod_base = OTHER; note = Phosphorothioate bond
  modified_base 2: mod_base = OTHER; note = 2'-Fluoro-cytidine
  modified_base 2^3: mod_base = OTHER; note = Phosphorothioate bond
  modified_base 3: mod_base = cm
  modified_base 4: mod_base = OTHER; note = 2'-O-methyl-adenosine
  modified_base 5: mod_base = um
  modified_base 6: mod_base = OTHER; note = 2'-Fluoro-uridine
  modified_base 7: mod_base = gm
  modified_base 8: mod_base = OTHER; note = 2'-Fluoro-cytidine
  modified_base 9: mod_base = OTHER; note = 2'-Fluoro-adenosine
  modified_base 10: mod_base = OTHER; note = 2'-O-methyl-adenosine
  modified_base 11: mod_base = cm
  modified_base 12: mod_base = gm
  modified_base 13: mod_base = gm
  modified_base 14: mod_base = OTHER; note = 2'-Fluoro-adenosine
  modified_base 15: mod_base = OTHER; note = 2'-O-methyl-adenosine
  modified_base 16: mod_base = OTHER; note = 2'-Fluoro-adenosine
  modified_base 17: mod_base = um
  modified_base 18: mod_base = gm
  modified_base 19: mod_base = um
  modified_base 20: mod_base = gm
  modified_base 21: mod_base = cm
  modified_base 21^22: mod_base = OTHER; note = Phosphorothioate bond
  modified_base 22: mod_base = cm
  modified_base 22^23: mod_base = OTHER; note = Phosphorothioate bond
  modified_base 23: mod_base = gm
tccattgcaacggaaatgtgccg

SEQ ID NO: 482 - RNA, 23 nt, synthetic construct
  source 1..23: mol_type = other RNA
  modified_base 1: mod_base = OTHER; note = 2'-O-methyl-adenosine
  modified_base 1^2: mod_base = OTHER; note = Phosphorothioate bond
  modified_base 2: mod_base = OTHER; note = 2'-Fluoro-adenosine
  modified_base 2^3: mod_base = OTHER; note = Phosphorothioate bond
  modified_base 3: mod_base = um
  modified_base 4: mod_base = um
  modified_base 5: mod_base = cm
  modified_base 6: mod_base = OTHER; note = 2'-Fluoro-adenosine
  modified_base 7: mod_base = OTHER; note = 2'-O-methyl-adenosine
  modified_base 8: mod_base = OTHER; note = 2'-Fluoro-guanosine
  modified_base 9: mod_base = OTHER; note = 2'-Fluoro-uridine
  modified_base 10: mod_base = um
  modified_base 11: mod_base = um
  modified_base 12: mod_base = OTHER; note = 2'-O-methyl-adenosine
  modified_base 13: mod_base = cm
  modified_base 14: mod_base = OTHER; note = 2'-Fluoro-adenosine
  modified_base 15: mod_base = um
  modified_base 16: mod_base = OTHER; note = 2'-Fluoro-adenosine
  modified_base 17: mod_base = gm
  modified_base 18: mod_base = cm
  modified_base 19: mod_base = OTHER; note = 2'-O-methyl-adenosine
  modified_base 20: mod_base = um
  modified_base 21: mod_base = gm
  modified_base 21^22: mod_base = OTHER; note = Phosphorothioate bond
  modified_base 22: mod_base = cm
  modified_base 22^23: mod_base = OTHER; note = Phosphorothioate bond
  modified_base 23: mod_base = cm
aattcaagtttacatagcatgcc

SEQ ID NO: 483 - RNA, 23 nt, synthetic construct
  source 1..23: mol_type = other RNA
  modified_base 1: mod_base = um
  modified_base 1^2: mod_base = OTHER; note = Phosphorothioate bond
  modified_base 2: mod_base = OTHER; note = 2'-Fluoro-uridine
  modified_base 2^3: mod_base = OTHER; note = Phosphorothioate bond
  modified_base 3: mod_base = cm
  modified_base 4: mod_base = gm
  modified_base 5: mod_base = gm
  modified_base 6: mod_base = OTHER; note = 2'-Fluoro-uridine
  modified_base 7: mod_base = cm
  modified_base 8: mod_base = OTHER; note = 2'-Fluoro-adenosine
  modified_base 9: mod_base = OTHER; note = 2'-Fluoro-adenosine
  modified_base 10: mod_base = OTHER; note = 2'-O-methyl-adenosine
  modified_base 11: mod_base = cm
  modified_base 12: mod_base = cm
  modified_base 13: mod_base = um
  modified_base 14: mod_base = OTHER; note = 2'-Fluoro-cytidine
  modified_base 15: mod_base = um
  modified_base 16: mod_base = OTHER; note = 2'-Fluoro-guanosine
  modified_base 17: mod_base = OTHER; note = 2'-O-methyl-adenosine
  modified_base 18: mod_base = gm
  modified_base 19: mod_base = gm
  modified_base 20: mod_base = OTHER; note = 2'-O-methyl-adenosine
  modified_base 21: mod_base = um
  modified_base 21^22: mod_base = OTHER; note = Phosphorothioate bond
  modified_base 22: mod_base = um
  modified_base 22^23: mod_base = OTHER; note = Phosphorothioate bond
  modified_base 23: mod_base = gm
ttcggtcaaacctctgaggattg

SEQ ID NO: 484 - RNA, 23 nt, synthetic construct
  source 1..23: mol_type = other RNA
  modified_base 1: mod_base = gm
  modified_base 1^2: mod_base = OTHER; note = Phosphorothioate bond
  modified_base 2: mod_base = OTHER; note = 2'-Fluoro-uridine
  modified_base 2^3: mod_base = OTHER; note = Phosphorothioate bond
  modified_base 3: mod_base = gm
  modified_base 4: mod_base = um
  modified_base 5: mod_base = cm
  modified_base 6: mod_base = OTHER; note = 2'-Fluoro-cytidine
  modified_base 7: mod_base = cm
  modified_base 8: mod_base = OTHER; note = 2'-Fluoro-guanosine
  modified_base 9: mod_base = OTHER; note = 2'-Fluoro-adenosine
  modified_base 10: mod_base = um
  modified_base 11: mod_base = gm
  modified_base 12: mod_base = um
  modified_base 13: mod_base = cm
  modified_base 14: mod_base = OTHER; note = 2'-Fluoro-cytidine
  modified_base 15: mod_base = OTHER; note = 2'-O-methyl-adenosine
  modified_base 16: mod_base = OTHER; note = 2'-Fluoro-cytidine
  modified_base 17: mod_base = um
  modified_base 18: mod_base = gm
  modified_base 19: mod_base = um
  modified_base 20: mod_base = gm
  modified_base 21: mod_base = OTHER; note = 2'-O-methyl-adenosine
  modified_base 21^22: mod_base = OTHER; note = Phosphorothioate bond
  modified_base 22: mod_base = um
  modified_base 22^23: mod_base = OTHER; note = Phosphorothioate bond
  modified_base 23: mod_base = um
gtgtcccgatgtccactgtgatt

SEQ ID NO: 485 - RNA, 23 nt, synthetic construct
  source 1..23: mol_type = other RNA
  modified_base 1: mod_base = um
  modified_base 1^2: mod_base = OTHER; note = Phosphorothioate bond
  modified_base 2: mod_base = OTHER; note = 2'-Fluoro-cytidine
  modified_base 2^3: mod_base = OTHER; note = Phosphorothioate bond
  modified_base 3: mod_base = cm
  modified_base 4: mod_base = um
  modified_base 5: mod_base = um
  modified_base 6: mod_base = OTHER; note = 2'-Fluoro-cytidine
  modified_base 7: mod_base = OTHER; note = 2'-O-methyl-adenosine
  modified_base 8: mod_base = OTHER; note = 2'-Fluoro-adenosine
  modified_base 9: mod_base = OTHER; note = 2'-Fluoro-guanosine
  modified_base 10: mod_base = gm
  modified_base 11: mod_base = cm
  modified_base 12: mod_base = um
  modified_base 13: mod_base = um
  modified_base 14: mod_base = OTHER; note = 2'-Fluoro-cytidine
  modified_base 15: mod_base = um
  modified_base 16: mod_base = OTHER; note = 2'-Fluoro-uridine
  modified_base 17: mod_base = gm
  modified_base 18: mod_base = OTHER; note = 2'-O-methyl-adenosine
  modified_base 19: mod_base = OTHER; note = 2'-O-methyl-adenosine
  modified_base 20: mod_base = OTHER; note = 2'-O-methyl-adenosine
  modified_base 21: mod_base = gm
  modified_base 21^22: mod_base = OTHER; note = Phosphorothioate bond
  modified_base 22: mod_base = cm
  modified_base 22^23: mod_base = OTHER; note = Phosphorothioate bond
  modified_base 23: mod_base = cm
tccttcaaggcttcttgaaagcc

SEQ ID NO: 486 - RNA, 23 nt, synthetic construct
  source 1..23: mol_type = other RNA
  modified_base 1: mod_base = um
  modified_base 1^2: mod_base = OTHER; note = Phosphorothioate bond
  modified_base 2: mod_base = OTHER; note = 2'-Fluoro-uridine
  modified_base 2^3: mod_base = OTHER; note = Phosphorothioate bond
  modified_base 3: mod_base = OTHER; note = 2'-O-methyl-adenosine
  modified_base 4: mod_base = cm
  modified_base 5: mod_base = um
  modified_base 6: mod_base = OTHER; note = 2'-Fluoro-uridine
  modified_base 7: mod_base = OTHER; note = 2'-O-methyl-adenosine
  modified_base 8: mod_base = OTHER; note = 2'-Fluoro-guanosine
  modified_base 9: mod_base = OTHER; note = 2'-Fluoro-adenosine
  modified_base 10: mod_base = gm
  modified_base 11: mod_base = cm
  modified_base 12: mod_base = OTHER; note = 2'-O-methyl-adenosine
  modified_base 13: mod_base = gm
  modified_base 14: mod_base = OTHER; note = 2'-Fluoro-adenosine
  modified_base 15: mod_base = gm
  modified_base 16: mod_base = OTHER; note = 2'-Fluoro-adenosine
  modified_base 17: mod_base = cm
  modified_base 18: mod_base = OTHER; note = 2'-O-methyl-adenosine
  modified_base 19: mod_base = cm
  modified_base 20: mod_base = cm
  modified_base 21: mod_base = um
  modified_base 21^22: mod_base = OTHER; note = Phosphorothioate bond
  modified_base 22: mod_base = cm
  modified_base 22^23: mod_base = OTHER; note = Phosphorothioate bond
  modified_base 23: mod_base = cm
ttacttagagcagagacacctcc

SEQ ID NO: 487 - RNA, 23 nt, synthetic construct
  source 1..23: mol_type = other RNA
  modified_base 1: mod_base = OTHER; note = 2'-O-methyl-adenosine
  modified_base 1^2: mod_base = OTHER; note = Phosphorothioate bond
  modified_base 2: mod_base = OTHER; note = 2'-Fluoro-guanosine
  modified_base 2^3: mod_base = OTHER; note = Phosphorothioate bond
  modified_base 3: mod_base = OTHER; note = 2'-O-methyl-adenosine
  modified_base 4: mod_base = gm
  modified_base 5: mod_base = cm
  modified_base 6: mod_base = OTHER; note = 2'-Fluoro-adenosine
  modified_base 7: mod_base = gm
  modified_base 8: mod_base = OTHER; note = 2'-Fluoro-adenosine
  modified_base 9: mod_base = OTHER; note = 2'-Fluoro-guanosine
  modified_base 10: mod_base = OTHER; note = 2'-O-methyl-adenosine
  modified_base 11: mod_base = cm
  modified_base 12: mod_base = OTHER; note = 2'-O-methyl-adenosine
  modified_base 13: mod_base = cm
  modified_base 14: mod_base = OTHER; note = 2'-Fluoro-cytidine
  modified_base 15: mod_base = um
  modified_base 16: mod_base = OTHER; note = 2'-Fluoro-cytidine
  modified_base 17: mod_base = cm
  modified_base 18: mod_base = OTHER; note = 2'-O-methyl-adenosine
  modified_base 19: mod_base = OTHER; note = 2'-O-methyl-adenosine
  modified_base 20: mod_base = OTHER; note = 2'-O-methyl-adenosine
  modified_base 21: mod_base = OTHER; note = 2'-O-methyl-adenosine
  modified_base 21^22: mod_base = OTHER; note = Phosphorothioate bond
  modified_base 22: mod_base = um
  modified_base 22^23: mod_base = OTHER; note = Phosphorothioate bond
  modified_base 23: mod_base = OTHER; note = 2'-O-methyl-adenosine
agagcagagacacctccaaaata

SEQ ID NO: 488 - RNA, 23 nt, synthetic construct
  source 1..23: mol_type = other RNA
  modified_base 1: mod_base = OTHER; note = 2'-O-methyl-adenosine
  modified_base 1^2: mod_base = OTHER; note = Phosphorothioate bond
  modified_base 2: mod_base = OTHER; note = 2'-Fluoro-adenosine
  modified_base 2^3: mod_base = OTHER; note = Phosphorothioate bond
  modified_base 3: mod_base = um
  modified_base 4: mod_base = um
  modified_base 5: mod_base = OTHER; note = 2'-O-methyl-adenosine
  modified_base 6: mod_base = OTHER; note = 2'-Fluoro-adenosine
  modified_base 7: mod_base = OTHER; note = 2'-O-methyl-adenosine
  modified_base 8: mod_base = OTHER; note = 2'-Fluoro-adenosine
  modified_base 9: mod_base = OTHER; note = 2'-Fluoro-guanosine
  modified_base 10: mod_base = gm
  modified_base 11: mod_base = cm
  modified_base 12: mod_base = OTHER; note = 2'-O-methyl-adenosine
  modified_base 13: mod_base = cm
  modified_base 14: mod_base = OTHER; note = 2'-Fluoro-adenosine
  modified_base 15: mod_base = um
  modified_base 16: mod_base = OTHER; note = 2'-Fluoro-uridine
  modified_base 17: mod_base = cm
  modified_base 18: mod_base = OTHER; note = 2'-O-methyl-adenosine
  modified_base 19: mod_base = um
  modified_base 20: mod_base = gm
  modified_base 21: mod_base = cm
  modified_base 21^22: mod_base = OTHER; note = Phosphorothioate bond
  modified_base 22: mod_base = um
  modified_base 22^23: mod_base = OTHER; note = Phosphorothioate bond
  modified_base 23: mod_base = gm
aattaaaaggcacattcatgctg

SEQ ID NO: 489 - RNA, 23 nt, synthetic construct
  source 1..23: mol_type = other RNA
  modified_base 1: mod_base = gm
  modified_base 1^2: mod_base = OTHER; note = Phosphorothioate bond
  modified_base 2: mod_base = OTHER; note = 2'-Fluoro-cytidine
  modified_base 2^3: mod_base = OTHER; note = Phosphorothioate bond
  modified_base 3: mod_base = um
  modified_base 4: mod_base = OTHER; note = 2'-O-methyl-adenosine
  modified_base 5: mod_base = gm
  modified_base 6: mod_base = OTHER; note = 2'-Fluoro-cytidine
  modified_base 7: mod_base = um
  modified_base 8: mod_base = OTHER; note = 2'-Fluoro-cytidine
  modified_base 9: mod_base = OTHER; note = 2'-Fluoro-guanosine
  modified_base 10: mod_base = gm
  modified_base 11: mod_base = um
  modified_base 12: mod_base = gm
  modified_base 13: mod_base = um
  modified_base 14: mod_base = OTHER; note = 2'-Fluoro-cytidine
  modified_base 15: mod_base = cm
  modified_base 16: mod_base = OTHER; note = 2'-Fluoro-cytidine
  modified_base 17: mod_base = gm
  modified_base 18: mod_base = OTHER; note = 2'-O-methyl-adenosine
  modified_base 19: mod_base = um
  modified_base 20: mod_base = gm
  modified_base 21: mod_base = um
  modified_base 21^22: mod_base = OTHER; note = Phosphorothioate bond
  modified_base 22: mod_base = cm
  modified_base 22^23: mod_base = OTHER; note = Phosphorothioate bond
  modified_base 23: mod_base = cm
gctagctcggtgtcccgatgtcc

SEQ ID NO: 490 - RNA, 23 nt, synthetic construct
  source 1..23: mol_type = other RNA
  modified_base 1: mod_base = cm
  modified_base 1^2: mod_base = OTHER; note = Phosphorothioate bond
  modified_base 2: mod_base = OTHER; note = 2'-Fluoro-cytidine
  modified_base 2^3: mod_base = OTHER; note = Phosphorothioate bond
  modified_base 3: mod_base = um
  modified_base 4: mod_base = um
  modified_base 5: mod_base = gm
  modified_base 6: mod_base = OTHER; note = 2'-Fluoro-uridine
  modified_base 7: mod_base = gm
  modified_base 8: mod_base = OTHER; note = 2'-Fluoro-adenosine
  modified_base 9: mod_base = OTHER; note = 2'-Fluoro-guanosine
  modified_base 10: mod_base = gm
  modified_base 11: mod_base = OTHER; note = 2'-O-methyl-adenosine
  modified_base 12: mod_base = gm
  modified_base 13: mod_base = OTHER; note = 2'-O-methyl-adenosine
  modified_base 14: mod_base = OTHER; note = 2'-Fluoro-guanosine
  modified_base 15: mod_base = OTHER; note = 2'-O-methyl-adenosine
  modified_base 16: mod_base = OTHER; note = 2'-Fluoro-cytidine
  modified_base 17: mod_base = gm
  modified_base 18: mod_base = cm
  modified_base 19: mod_base = OTHER; note = 2'-O-methyl-adenosine
  modified_base 20: mod_base = gm
  modified_base 21: mod_base = um
  modified_base 21^22: mod_base = OTHER; note = Phosphorothioate bond
  modified_base 22: mod_base = cm
  modified_base 22^23: mod_base = OTHER; note = Phosphorothioate bond
  modified_base 23: mod_base = cm
ccttgtgaggagagacgcagtcc

SEQ ID NO: 491 - RNA, 23 nt, synthetic construct
  source 1..23: mol_type = other RNA
  modified_base 1: mod_base = um
  modified_base 1^2: mod_base = OTHER; note = Phosphorothioate bond
  modified_base 2: mod_base = OTHER; note = 2'-Fluoro-cytidine
  modified_base 2^3: mod_base = OTHER; note = Phosphorothioate bond
  modified_base 3: mod_base = cm
  modified_base 4: mod_base = OTHER; note = 2'-O-methyl-adenosine
  modified_base 5: mod_base = cm
  modified_base 6: mod_base = OTHER; note = 2'-Fluoro-uridine
  modified_base 7: mod_base = gm
  modified_base 8: mod_base = OTHER; note = 2'-Fluoro-uridine
  modified_base 9: mod_base = OTHER; note = 2'-Fluoro-guanosine
  modified_base 10: mod_base = OTHER; note = 2'-O-methyl-adenosine
  modified_base 11: mod_base = um
  modified_base 12: mod_base = um
  modified_base 13: mod_base = um
  modified_base 14: mod_base = OTHER; note = 2'-Fluoro-guanosine
  modified_base 15: mod_base = gm
  modified_base 16: mod_base = OTHER; note = 2'-Fluoro-guanosine
  modified_base 17: mod_base = um
  modified_base 18: mod_base = OTHER; note = 2'-O-methyl-adenosine
  modified_base 19: mod_base = um
  modified_base 20: mod_base = OTHER; note = 2'-O-methyl-adenosine
  modified_base 21: mod_base = cm
  modified_base 21^22: mod_base = OTHER; note = Phosphorothioate bond
  modified_base 22: mod_base = OTHER; note = 2'-O-methyl-adenosine
  modified_base 22^23: mod_base = OTHER; note = Phosphorothioate bond
  modified_base 23: mod_base = OTHER; note = 2'-O-methyl-adenosine
tccactgtgatttgggtatacaa

SEQ ID NO: 492 - RNA, 23 nt, synthetic construct
  source 1..23: mol_type = other RNA
  modified_base 1: mod_base = gm
  modified_base 1^2: mod_base = OTHER; note = Phosphorothioate bond
  modified_base 2: mod_base = OTHER; note = 2'-Fluoro-guanosine
  modified_base 2^3: mod_base = OTHER; note = Phosphorothioate bond
  modified_base 3: mod_base = um
  modified_base 4: mod_base = OTHER; note = 2'-O-methyl-adenosine
  modified_base 5: mod_base = um
  modified_base 6: mod_base = OTHER; note = 2'-Fluoro-cytidine
  modified_base 7: mod_base = um
  modified_base 8: mod_base = OTHER; note = 2'-Fluoro-cytidine
  modified_base 9: mod_base = OTHER; note = 2'-Fluoro-uridine
  modified_base 10: mod_base = gm
  modified_base 11: mod_base = um
  modified_base 12: mod_base = OTHER; note = 2'-O-methyl-adenosine
  modified_base 13: mod_base = cm
  modified_base 14: mod_base = OTHER; note = 2'-Fluoro-adenosine
  modified_base 15: mod_base = um
  modified_base 16: mod_base = OTHER; note = 2'-Fluoro-cytidine
  modified_base 17: mod_base = cm
  modified_base 18: mod_base = OTHER; note = 2'-O-methyl-adenosine
  modified_base 19: mod_base = gm
  modified_base 20: mod_base = cm
  modified_base 21: mod_base = OTHER; note = 2'-O-methyl-adenosine
  modified_base 21^22: mod_base = OTHER; note = Phosphorothioate bond
  modified_base 22: mod_base = cm
  modified_base 22^23: mod_base = OTHER; note = Phosphorothioate bond
  modified_base 23: mod_base = cm
ggtatctctgtacatccagcacc

SEQ ID NO: 493 - RNA, 23 nt, synthetic construct
  source 1..23: mol_type = other RNA
  modified_base 1: mod_base = OTHER; note = 2'-O-methyl-adenosine
  modified_base 1^2: mod_base = OTHER; note = Phosphorothioate bond
  modified_base 2: mod_base = OTHER; note = 2'-Fluoro-uridine
  modified_base 2^3: mod_base = OTHER; note = Phosphorothioate bond
  modified_base 3: mod_base = OTHER; note = 2'-O-methyl-adenosine
  modified_base 4: mod_base = gm
  modified_base 5: mod_base = gm
  modified_base 6: mod_base = OTHER; note = 2'-Fluoro-adenosine
  modified_base 7: mod_base = OTHER; note = 2'-O-methyl-adenosine
  modified_base 8: mod_base = OTHER; note = 2'-Fluoro-adenosine
  modified_base 9: mod_base = OTHER; note = 2'-Fluoro-uridine
  modified_base 10: mod_base = um
  modified_base 11: mod_base = cm
  modified_base 12: mod_base = OTHER; note = 2'-O-methyl-adenosine
  modified_base 13: mod_base = OTHER; note = 2'-O-methyl-adenosine
  modified_base 14: mod_base = OTHER; note = 2'-Fluoro-guanosine
  modified_base 15: mod_base = um
  modified_base 16: mod_base = OTHER; note = 2'-Fluoro-uridine
  modified_base 17: mod_base = um
  modified_base 18: mod_base = OTHER; note = 2'-O-methyl-adenosine
  modified_base 19: mod_base = cm
  modified_base 20: mod_base = OTHER; note = 2'-O-methyl-adenosine
  modified_base 21: mod_base = um
  modified_base 21^22: mod_base = OTHER; note = Phosphorothioate bond
  modified_base 22: mod_base = OTHER; note = 2'-O-methyl-adenosine
  modified_base 22^23: mod_base = OTHER; note = Phosphorothioate bond
  modified_base 23: mod_base = gm
ataggaaattcaagtttacatag

SEQ ID NO: 494 - RNA, 23 nt, synthetic construct
  source 1..23: mol_type = other RNA
  modified_base 1: mod_base = cm
  modified_base 1^2: mod_base = OTHER; note = Phosphorothioate bond
  modified_base 2: mod_base = OTHER; note = 2'-Fluoro-adenosine
  modified_base 2^3: mod_base = OTHER; note = Phosphorothioate bond
  modified_base 3: mod_base = um
  modified_base 4: mod_base = cm
  modified_base 5: mod_base = um
  modified_base 6: mod_base = OTHER; note = 2'-Fluoro-uridine
  modified_base 7: mod_base = cm
  modified_base 8: mod_base = OTHER; note = 2'-Fluoro-uridine
  modified_base 9: mod_base = OTHER; note = 2'-Fluoro-cytidine
  modified_base 10: mod_base = cm
  modified_base 11: mod_base = um
  modified_base 12: mod_base = cm
  modified_base 13: mod_base = cm
  modified_base 14: mod_base = OTHER; note = 2'-Fluoro-cytidine
  modified_base 15: mod_base = cm
  modified_base 16: mod_base = OTHER; note = 2'-Fluoro-adenosine
  modified_base 17: mod_base = gm
  modified_base 18: mod_base = cm
  modified_base 19: mod_base = cm
  modified_base 20: mod_base = cm
  modified_base 21: mod_base = cm
  modified_base 21^22: mod_base = OTHER; note = Phosphorothioate bond
  modified_base 22: mod_base = OTHER; note = 2'-O-methyl-adenosine
  modified_base 22^23: mod_base = OTHER; note = Phosphorothioate bond
  modified_base 23: mod_base = OTHER; note = 2'-O-methyl-adenosine
catcttctcctccccagccccaa

SEQ ID NO: 495 - RNA, 23 nt, synthetic construct
  source 1..23: mol_type = other RNA
  modified_base 1: mod_base = um
  modified_base 1^2: mod_base = OTHER; note = Phosphorothioate bond
  modified_base 2: mod_base = OTHER; note = 2'-Fluoro-guanosine
  modified_base 2^3: mod_base = OTHER; note = Phosphorothioate bond
  modified_base 3: mod_base = um
  modified_base 4: mod_base = um
  modified_base 5: mod_base = gm
  modified_base 6: mod_base = OTHER; note = 2'-Fluoro-uridine
  modified_base 7: mod_base = um
  modified_base 8: mod_base = OTHER; note = 2'-Fluoro-uridine
  modified_base 9: mod_base = OTHER; note = 2'-Fluoro-adenosine
  modified_base 10: mod_base = cm
  modified_base 11: mod_base = um
  modified_base 12: mod_base = um
  modified_base 13: mod_base = OTHER; note = 2'-O-methyl-adenosine
  modified_base 14: mod_base = OTHER; note = 2'-Fluoro-guanosine
  modified_base 15: mod_base = OTHER; note = 2'-O-methyl-adenosine
  modified_base 16: mod_base = OTHER; note = 2'-Fluoro-guanosine
  modified_base 17: mod_base = cm
  modified_base 18: mod_base = OTHER; note = 2'-O-methyl-adenosine
  modified_base 19: mod_base = gm
  modified_base 20: mod_base = OTHER; note = 2'-O-methyl-adenosine
  modified_base 21: mod_base = gm
  modified_base 21^22: mod_base = OTHER; note = Phosphorothioate bond
  modified_base 22: mod_base = OTHER; note = 2'-O-methyl-adenosine
  modified_base 22^23: mod_base = OTHER; note = Phosphorothioate bond
  modified_base 23: mod_base = cm
tgttgtttacttagagcagagac

SEQ ID NO: 496 - RNA, 23 nt, synthetic construct
  source 1..23: mol_type = other RNA
  modified_base 1: mod_base = OTHER; note = 2'-O-methyl-adenosine
  modified_base 1^2: mod_base = OTHER; note = Phosphorothioate bond
  modified_base 2: mod_base = OTHER; note = 2'-Fluoro-uridine
  modified_base 2^3: mod_base = OTHER; note = Phosphorothioate bond
  modified_base 3: mod_base = cm
  modified_base 4: mod_base = um
  modified_base 5: mod_base = um
  modified_base 6: mod_base = OTHER; note = 2'-Fluoro-cytidine
  modified_base 7: mod_base = um
  modified_base 8: mod_base = OTHER; note = 2'-Fluoro-cytidine
  modified_base 9: mod_base = OTHER; note = 2'-Fluoro-cytidine
  modified_base 10: mod_base = um
  modified_base 11: mod_base = cm
  modified_base 12: mod_base = cm
  modified_base 13: mod_base = cm
  modified_base 14: mod_base = OTHER; note = 2'-Fluoro-cytidine
  modified_base 15: mod_base = OTHER; note = 2'-O-methyl-adenosine
  modified_base 16: mod_base = OTHER; note = 2'-Fluoro-guanosine
  modified_base 17: mod_base = cm
  modified_base 18: mod_base = cm
  modified_base 19: mod_base = cm
  modified_base 20: mod_base = cm
  modified_base 21: mod_base = OTHER; note = 2'-O-methyl-adenosine
  modified_base 21^22: mod_base = OTHER; note = Phosphorothioate bond
  modified_base 22: mod_base = OTHER; note = 2'-O-methyl-adenosine
  modified_base 22^23: mod_base = OTHER; note = Phosphorothioate bond
  modified_base 23: mod_base = um
atcttctcctccccagccccaat

SEQ ID NO: 497 - RNA, 23 nt, synthetic construct
  source 1..23: mol_type = other RNA
  modified_base 1: mod_base = gm
  modified_base 1^2: mod_base = OTHER; note = Phosphorothioate bond
  modified_base 2: mod_base = OTHER; note = 2'-Fluoro-uridine
  modified_base 2^3: mod_base = OTHER; note = Phosphorothioate bond
  modified_base 3: mod_base = cm
  modified_base 4: mod_base = cm
  modified_base 5: mod_base = cm
  modified_base 6: mod_base = OTHER; note = 2'-Fluoro-guanosine
  modified_base 7: mod_base = OTHER; note = 2'-O-methyl-adenosine
  modified_base 8: mod_base = OTHER; note = 2'-Fluoro-uridine
  modified_base 9: mod_base = OTHER; note = 2'-Fluoro-guanosine
  modified_base 10: mod_base = um
  modified_base 11: mod_base = cm
  modified_base 12: mod_base = cm
  modified_base 13: mod_base = OTHER; note = 2'-O-methyl-adenosine
  modified_base 14: mod_base = OTHER; note = 2'-Fluoro-cytidine
  modified_base 15: mod_base = um
  modified_base 16: mod_base = OTHER; note = 2'-Fluoro-guanosine
  modified_base 17: mod_base = um
  modified_base 18: mod_base = gm
  modified_base 19: mod_base = OTHER; note = 2'-O-methyl-adenosine
  modified_base 20: mod_base = um
  modified_base 21: mod_base = um
  modified_base 21^22: mod_base = OTHER; note = Phosphorothioate bond
  modified_base 22: mod_base = um
  modified_base 22^23: mod_base = OTHER; note = Phosphorothioate bond
  modified_base 23: mod_base = gm
gtcccgatgtccactgtgatttg

SEQ ID NO: 498 - RNA, 23 nt, synthetic construct
  source 1..23: mol_type = other RNA
  modified_base 1: mod_base = cm
  modified_base 1^2: mod_base = OTHER; note = Phosphorothioate bond
  modified_base 2: mod_base = OTHER; note = 2'-Fluoro-uridine
  modified_base 2^3: mod_base = OTHER; note = Phosphorothioate bond
  modified_base 3: mod_base = cm
  modified_base 4: mod_base = gm
  modified_base 5: mod_base = gm
  modified_base 6: mod_base = OTHER; note = 2'-Fluoro-uridine
  modified_base 7: mod_base = gm
  modified_base 8: mod_base = OTHER; note = 2'-Fluoro-uridine
  modified_base 9: mod_base = OTHER; note = 2'-Fluoro-cytidine
  modified_base 10: mod_base = cm
  modified_base 11: mod_base = cm
  modified_base 12: mod_base = gm
  modified_base 13: mod_base = OTHER; note = 2'-O-methyl-adenosine
  modified_base 14: mod_base = OTHER; note = 2'-Fluoro-uridine
  modified_base 15: mod_base = gm
  modified_base 16: mod_base = OTHER; note = 2'-Fluoro-uridine
  modified_base 17: mod_base = cm
  modified_base 18: mod_base = cm
  modified_base 19: mod_base = OTHER; note = 2'-O-methyl-adenosine
  modified_base 20: mod_base = cm
  modified_base 21: mod_base = um
  modified_base 21^22: mod_base = OTHER; note = Phosphorothioate bond
  modified_base 22: mod_base = gm
  modified_base 22^23: mod_base = OTHER; note = Phosphorothioate bond
  modified_base 23: mod_base = um
ctcggtgtcccgatgtccactgt

SEQ ID NO: 499 - RNA, 23 nt, synthetic construct
  source 1..23: mol_type = other RNA
  modified_base 1: mod_base = um
  modified_base 1^2: mod_base = OTHER; note = Phosphorothioate bond
  modified_base 2: mod_base = OTHER; note = 2'-Fluoro-cytidine
  modified_base 2^3: mod_base = OTHER; note = Phosphorothioate bond
  modified_base 3: mod_base = cm
  modified_base 4: mod_base = cm
  modified_base 5: mod_base = cm
  modified_base 6: mod_base = OTHER; note = 2'-Fluoro-adenosine
  modified_base 7: mod_base = gm
  modified_base 8: mod_base = OTHER; note = 2'-Fluoro-cytidine
  modified_base 9: mod_base = OTHER; note = 2'-Fluoro-cytidine
  modified_base 10: mod_base = cm
  modified_base 11: mod_base = cm
  modified_base 12: mod_base = OTHER; note = 2'-O-methyl-adenosine
  modified_base 13: mod_base = OTHER; note = 2'-O-methyl-adenosine
  modified_base 14: mod_base = OTHER; note = 2'-Fluoro-uridine
  modified_base 15: mod_base = OTHER; note = 2'-O-methyl-adenosine
  modified_base 16: mod_base = OTHER; note = 2'-Fluoro-adenosine
  modified_base 17: mod_base = um
  modified_base 18: mod_base = um
  modified_base 19: mod_base = OTHER; note = 2'-O-methyl-adenosine
  modified_base 20: mod_base = um
  modified_base 21: mod_base = um
  modified_base 21^22: mod_base = OTHER; note = Phosphorothioate bond
  modified_base 22: mod_base = OTHER; note = 2'-O-methyl-adenosine
  modified_base 22^23: mod_base = OTHER; note = Phosphorothioate bond
  modified_base 23: mod_base = gm
tccccagccccaataattattag

SEQ ID NO: 500 - RNA, 23 nt, synthetic construct
  source 1..23: mol_type = other RNA
  modified_base 1: mod_base = OTHER; note = 2'-O-methyl-adenosine
  modified_base 1^2: mod_base = OTHER; note = Phosphorothioate bond
  modified_base 2: mod_base = OTHER; note = 2'-Fluoro-guanosine
  modified_base 2^3: mod_base = OTHER; note = Phosphorothioate bond
  modified_base 3: mod_base = OTHER; note = 2'-O-methyl-adenosine
  modified_base 4: mod_base = gm
  modified_base 5: mod_base = OTHER; note = 2'-O-methyl-adenosine
  modified_base 6: mod_base = OTHER; note = 2'-Fluoro-cytidine
  modified_base 7: mod_base = OTHER; note = 2'-O-methyl-adenosine
  modified_base 8: mod_base = OTHER; note = 2'-Fluoro-cytidine
  modified_base 9: mod_base = OTHER; note = 2'-Fluoro-cytidine
  modified_base 10: mod_base = um
  modified_base 11: mod_base = cm
  modified_base 12: mod_base = cm
  modified_base 13: mod_base = OTHER; note = 2'-O-methyl-adenosine
  modified_base 14: mod_base = OTHER; note = 2'-Fluoro-adenosine
  modified_base 15: mod_base = OTHER; note = 2'-O-methyl-adenosine
  modified_base 16: mod_base = OTHER; note = 2'-Fluoro-adenosine
  modified_base 17: mod_base = um
  modified_base 18: mod_base = OTHER; note = 2'-O-methyl-adenosine
  modified_base 19: mod_base = cm
  modified_base 20: mod_base = um
  modified_base 21: mod_base = gm
  modified_base 21^22: mod_base = OTHER; note = Phosphorothioate bond
  modified_base 22: mod_base = OTHER; note = 2'-O-methyl-adenosine
  modified_base 22^23: mod_base = OTHER; note = Phosphorothioate bond
  modified_base 23: mod_base = OTHER; note = 2'-O-methyl-adenosine
agagacacctccaaaatactgaa

SEQ ID NO: 501 - RNA, 23 nt, synthetic construct
  source 1..23: mol_type = other RNA
  modified_base 1: mod_base = gm
  modified_base 1^2: mod_base = OTHER; note = Phosphorothioate bond
  modified_base 2: mod_base = OTHER; note = 2'-Fluoro-adenosine
  modified_base 2^3: mod_base = OTHER; note = Phosphorothioate bond
  modified_base 3: mod_base = gm
  modified_base 4: mod_base = cm
  modified_base 5: mod_base = OTHER; note = 2'-O-methyl-adenosine
  modified_base 6: mod_base = OTHER; note = 2'-Fluoro-guanosine
  modified_base 7: mod_base = OTHER; note = 2'-O-methyl-adenosine
  modified_base 8: mod_base = OTHER; note = 2'-Fluoro-guanosine
  modified_base 9: mod_base = OTHER; note = 2'-Fluoro-adenosine
  modified_base 10: mod_base = cm
  modified_base 11: mod_base = OTHER; note = 2'-O-methyl-adenosine
  modified_base 12: mod_base = cm
  modified_base 13: mod_base = cm
  modified_base 14: mod_base = OTHER; note = 2'-Fluoro-uridine
  modified_base 15: mod_base = cm
  modified_base 16: mod_base = OTHER; note = 2'-Fluoro-cytidine
  modified_base 17: mod_base = OTHER; note = 2'-O-methyl-adenosine
  modified_base 18: mod_base = OTHER; note = 2'-O-methyl-adenosine
  modified_base 19: mod_base = OTHER; note = 2'-O-methyl-adenosine
  modified_base 20: mod_base = OTHER; note = 2'-O-methyl-adenosine
  modified_base 21: mod_base = um
  modified_base 21^22: mod_base = OTHER; note = Phosphorothioate bond
  modified_base 22: mod_base = OTHER; note = 2'-O-methyl-adenosine
  modified_base 22^23: mod_base = OTHER; note = Phosphorothioate bond
  modified_base 23: mod_base = cm
gagcagagacacctccaaaatac

SEQ ID NO: 502 - RNA, 23 nt, synthetic construct
  source 1..23: mol_type = other RNA
  modified_base 1: mod_base = OTHER; note = 2'-O-methyl-adenosine
  modified_base 1^2: mod_base = OTHER; note = Phosphorothioate bond
  modified_base 2: mod_base = OTHER; note = 2'-Fluoro-uridine
  modified_base 2^3: mod_base = OTHER; note = Phosphorothioate bond
  modified_base 3: mod_base = OTHER; note = 2'-O-methyl-adenosine
  modified_base 4: mod_base = OTHER; note = 2'-Fluoro-cytidine
  modified_base 5: mod_base = OTHER; note = 2'-O-methyl-adenosine
  modified_base 6: mod_base = OTHER; note = 2'-Fluoro-uridine
  modified_base 7: mod_base = OTHER; note = 2'-O-methyl-adenosine
  modified_base 8: mod_base = gm
  modified_base 9: mod_base = gm
  modified_base 10: mod_base = OTHER; note = 2'-O-methyl-adenosine
  modified_base 11: mod_base = OTHER; note = 2'-O-methyl-adenosine
  modified_base 12: mod_base = OTHER; note = 2'-O-methyl-adenosine
  modified_base 13: mod_base = um
  modified_base 14: mod_base = OTHER; note = 2'-Fluoro-uridine
  modified_base 15: mod_base = cm
  modified_base 16: mod_base = OTHER; note = 2'-Fluoro-adenosine
  modified_base 17: mod_base = OTHER; note = 2'-O-methyl-adenosine
  modified_base 18: mod_base = gm
  modified_base 19: mod_base = um
  modified_base 20: mod_base = um
  modified_base 21: mod_base = um
  modified_base 21^22: mod_base = OTHER; note = Phosphorothioate bond
  modified_base 22: mod_base = OTHER; note = 2'-O-methyl-adenosine
  modified_base 22^23: mod_base = OTHER; note = Phosphorothioate bond
  modified_base 23: mod_base = cm
atacataggaaattcaagtttac

SEQ ID NO: 503 - RNA, 23 nt, synthetic construct
  source 1..23: mol_type = other RNA
  modified_base 1: mod_base = OTHER; note = 2'-O-methyl-adenosine
  modified_base 1^2: mod_base = OTHER; note = Phosphorothioate bond
  modified_base 2: mod_base = OTHER; note = 2'-Fluoro-uridine
  modified_base 2^3: mod_base = OTHER; note = Phosphorothioate bond
  modified_base 3: mod_base = OTHER; note = 2'-O-methyl-adenosine
  modified_base 4: mod_base = cm
  modified_base 5: mod_base = OTHER; note = 2'-O-methyl-adenosine
  modified_base 6: mod_base = OTHER; note = 2'-Fluoro-uridine
  modified_base 7: mod_base = OTHER; note = 2'-O-methyl-adenosine
  modified_base 8: mod_base = gm
  modified_base 9: mod_base = OTHER; note = 2'-Fluoro-guanosine
  modified_base 10: mod_base = OTHER; note = 2'-O-methyl-adenosine
  modified_base 11: mod_base = OTHER; note = 2'-O-methyl-adenosine
  modified_base 12: mod_base = OTHER; note = 2'-O-methyl-adenosine
  modified_base 13: mod_base = um
  modified_base 14: mod_base = OTHER; note = 2'-Fluoro-uridine
  modified_base 15: mod_base = cm
  modified_base 16: mod_base = OTHER; note = 2'-Fluoro-adenosine
  modified_base 17: mod_base = OTHER; note = 2'-O-methyl-adenosine
  modified_base 18: mod_base = gm
  modified_base 19: mod_base = um
  modified_base 20: mod_base = um
  modified_base 21: mod_base = um
  modified_base 21^22: mod_base = OTHER; note = Phosphorothioate bond
  modified_base 22: mod_base = OTHER; note = 2'-O-methyl-adenosine
  modified_base 22^23: mod_base = OTHER; note = Phosphorothioate bond
  modified_base 23: mod_base = cm
atacataggaaattcaagtttac

SEQ ID NO: 504 - RNA, 23 nt, synthetic construct
  source 1..23: mol_type = other RNA
  modified_base 1: mod_base = OTHER; note = 2'-O-methyl-adenosine
  modified_base 1^2: mod_base = OTHER; note = Phosphorothioate bond
  modified_base 2: mod_base = OTHER; note = 2'-Fluoro-adenosine
  modified_base 2^3: mod_base = OTHER; note = Phosphorothioate bond
  modified_base 3: mod_base = OTHER; note = 2'-O-methyl-adenosine
  modified_base 4: mod_base = OTHER; note = 2'-Fluoro-adenosine
  modified_base 5: mod_base = um
  modified_base 6: mod_base = OTHER; note = 2'-Fluoro-adenosine
  modified_base 7: mod_base = cm
  modified_base 8: mod_base = OTHER; note = 2'-O-methyl-adenosine
  modified_base 9: mod_base = um
  modified_base 10: mod_base = OTHER; note = 2'-O-methyl-adenosine
  modified_base 11: mod_base = gm
  modified_base 12: mod_base = gm
  modified_base 13: mod_base = OTHER; note = 2'-O-methyl-adenosine
  modified_base 14: mod_base = OTHER; note = 2'-Fluoro-adenosine
  modified_base 15: mod_base = OTHER; note = 2'-O-methyl-adenosine
  modified_base 16: mod_base = OTHER; note = 2'-Fluoro-uridine
  modified_base 17: mod_base = um
  modified_base 18: mod_base = cm
  modified_base 19: mod_base = OTHER; note = 2'-O-methyl-adenosine
  modified_base 20: mod_base = OTHER; note = 2'-O-methyl-adenosine
  modified_base 21: mod_base = gm
  modified_base 21^22: mod_base = OTHER; note = Phosphorothioate bond
  modified_base 22: mod_base = um
  modified_base 22^23: mod_base = OTHER; note = Phosphorothioate bond
  modified_base 23: mod_base = um
aaaatacataggaaattcaagtt

SEQ ID NO: 505 - RNA, 23 nt, synthetic construct
  source 1..23: mol_type = other RNA
  modified_base 1: mod_base = OTHER; note = 2'-O-methyl-adenosine
  modified_base 1^2: mod_base = OTHER; note = Phosphorothioate bond
  modified_base 2: mod_base = OTHER; note = 2'-Fluoro-adenosine
  modified_base 2^3: mod_base = OTHER; note = Phosphorothioate bond
  modified_base 3: mod_base = OTHER; note = 2'-O-methyl-adenosine
  modified_base 4: mod_base = OTHER; note = 2'-O-methyl-adenosine
  modified_base 5: mod_base = um
  modified_base 6: mod_base = OTHER; note = 2'-Fluoro-adenosine
  modified_base 7: mod_base = cm
  modified_base 8: mod_base = OTHER; note = 2'-O-methyl-adenosine
  modified_base 9: mod_base = OTHER; note = 2'-Fluoro-uridine
  modified_base 10: mod_base = OTHER; note = 2'-O-methyl-adenosine
  modified_base 11: mod_base = gm
  modified_base 12: mod_base = gm
  modified_base 13: mod_base = OTHER; note = 2'-O-methyl-adenosine
  modified_base 14: mod_base = OTHER; note = 2'-Fluoro-adenosine
  modified_base 15: mod_base = OTHER; note = 2'-O-methyl-adenosine
  modified_base 16: mod_base = OTHER; note = 2'-Fluoro-uridine
  modified_base 17: mod_base = um
  modified_base 18: mod_base = cm
  modified_base 19: mod_base = OTHER; note = 2'-O-methyl-adenosine
  modified_base 20: mod_base = OTHER; note = 2'-O-methyl-adenosine
  modified_base 21: mod_base = gm
  modified_base 21^22: mod_base = OTHER; note = Phosphorothioate bond
  modified_base 22: mod_base = um
  modified_base 22^23: mod_base = OTHER; note = Phosphorothioate bond
  modified_base 23: mod_base = um
aaaatacataggaaattcaagtt

SEQ ID NO: 506 - RNA, 23 nt, synthetic construct
  source 1..23: mol_type = other RNA
  modified_base 1: mod_base = um
  modified_base 1^2: mod_base = OTHER; note = Phosphorothioate bond
  modified_base 2: mod_base = OTHER; note = 2'-Fluoro-uridine
  modified_base 2^3: mod_base = OTHER; note = Phosphorothioate bond
  modified_base 3: mod_base = um
  modified_base 4: mod_base = OTHER; note = 2'-Fluoro-uridine
  modified_base 5: mod_base = OTHER; note = 2'-O-methyl-adenosine
  modified_base 6: mod_base = OTHER; note = 2'-Fluoro-adenosine
  modified_base 7: mod_base = gm
  modified_base 8: mod_base = gm
  modified_base 9: mod_base = cm
  modified_base 10: mod_base = OTHER; note = 2'-O-methyl-adenosine
  modified_base 11: mod_base = cm
  modified_base 12: mod_base = um
  modified_base 13: mod_base = um
  modified_base 14: mod_base = OTHER; note = 2'-Fluoro-uridine
  modified_base 15: mod_base = gm
  modified_base 16: mod_base = OTHER; note = 2'-Fluoro-guanosine
  modified_base 17: mod_base = OTHER; note = 2'-O-methyl-adenosine
  modified_base 18: mod_base = OTHER; note = 2'-O-methyl-adenosine
  modified_base 19: mod_base = OTHER; note = 2'-O-methyl-adenosine
  modified_base 20: mod_base = OTHER; note = 2'-O-methyl-adenosine
  modified_base 21: mod_base = gm
  modified_base 21^22: mod_base = OTHER; note = Phosphorothioate bond
  modified_base 22: mod_base = um
  modified_base 22^23: mod_base = OTHER; note = Phosphorothioate bond
  modified_base 23: mod_base = cm
ttttaaggcactttggaaaagtc

SEQ ID NO: 507 - RNA, 23 nt, synthetic construct
  source 1..23: mol_type = other RNA
  modified_base 1: mod_base = um
  modified_base 1^2: mod_base = OTHER; note = Phosphorothioate bond
  modified_base 2: mod_base = OTHER; note = 2'-Fluoro-uridine
  modified_base 2^3: mod_base = OTHER; note = Phosphorothioate bond
  modified_base 3: mod_base = um
  modified_base 4: mod_base = um
  modified_base 5: mod_base = OTHER; note = 2'-O-methyl-adenosine
  modified_base 6: mod_base = OTHER; note = 2'-Fluoro-adenosine
  modified_base 7: mod_base = gm
  modified_base 8: mod_base = gm
  modified_base 9: mod_base = OTHER; note = 2'-Fluoro-cytidine
  modified_base 10: mod_base = OTHER; note = 2'-O-methyl-adenosine
  modified_base 11: mod_base = cm
  modified_base 12: mod_base = um
  modified_base 13: mod_base = um
  modified_base 14: mod_base = OTHER; note = 2'-Fluoro-uridine
  modified_base 15: mod_base = gm
  modified_base 16: mod_base = OTHER; note = 2'-Fluoro-guanosine
  modified_base 17: mod_base = OTHER; note = 2'-O-methyl-adenosine
  modified_base 18: mod_base = OTHER; note = 2'-O-methyl-adenosine
  modified_base 19: mod_base = OTHER; note = 2'-O-methyl-adenosine
  modified_base 20: mod_base = OTHER; note = 2'-O-methyl-adenosine
  modified_base 21: mod_base = gm
  modified_base 21^22: mod_base = OTHER; note = Phosphorothioate bond
  modified_base 22: mod_base = um
  modified_base 22^23: mod_base = OTHER; note = Phosphorothioate bond
  modified_base 23: mod_base = cm
ttttaaggcactttggaaaagtc

SEQ ID NO: 508 - RNA, 23 nt, synthetic construct
  source 1..23: mol_type = other RNA
  modified_base 1: mod_base = OTHER; note = 2'-O-methyl-adenosine
  modified_base 1^2: mod_base = OTHER; note = Phosphorothioate bond
  modified_base 2: mod_base = OTHER; note = 2'-Fluoro-guanosine
  modified_base 2^3: mod_base = OTHER; note = Phosphorothioate bond
  modified_base 3: mod_base = OTHER; note = 2'-O-methyl-adenosine
  modified_base 4: mod_base = OTHER; note = 2'-Fluoro-guanosine
  modified_base 5: mod_base = OTHER; note = 2'-O-methyl-adenosine
  modified_base 6: mod_base = OTHER; note = 2'-Fluoro-cytidine
  modified_base 7: mod_base = OTHER; note = 2'-O-methyl-adenosine
  modified_base 8: mod_base = cm
  modified_base 9: mod_base = cm
  modified_base 10: mod_base = um
  modified_base 11: mod_base = cm
  modified_base 12: mod_base = cm
  modified_base 13: mod_base = OTHER; note = 2'-O-methyl-adenosine
  modified_base 14: mod_base = OTHER; note = 2'-Fluoro-adenosine
  modified_base 15: mod_base = OTHER; note = 2'-O-methyl-adenosine
  modified_base 16: mod_base = OTHER; note = 2'-Fluoro-adenosine
  modified_base 17: mod_base = um
  modified_base 18: mod_base = OTHER; note = 2'-O-methyl-adenosine
  modified_base 19: mod_base = cm
  modified_base 20: mod_base = um
  modified_base 21: mod_base = gm
  modified_base 21^22: mod_base = OTHER; note = Phosphorothioate bond
  modified_base 22: mod_base = OTHER; note = 2'-O-methyl-adenosine
  modified_base 22^23: mod_base = OTHER; note = Phosphorothioate bond
  modified_base 23: mod_base = OTHER; note = 2'-O-methyl-adenosine
agagacacctccaaaatactgaa

SEQ ID NO: 509 - RNA, 23 nt, synthetic construct
  source 1..23: mol_type = other RNA
  modified_base 1: mod_base = OTHER; note = 2'-O-methyl-adenosine
  modified_base 1^2: mod_base = OTHER; note = Phosphorothioate bond
  modified_base 2: mod_base = OTHER; note = 2'-Fluoro-guanosine
  modified_base 2^3: mod_base = OTHER; note = Phosphorothioate bond
  modified_base 3: mod_base = OTHER; note = 2'-O-methyl-adenosine
  modified_base 4: mod_base = gm
  modified_base 5: mod_base = OTHER; note = 2'-O-methyl-adenosine
  modified_base 6: mod_base = OTHER; note = 2'-Fluoro-cytidine
  modified_base 7: mod_base = OTHER; note = 2'-O-methyl-adenosine
  modified_base 8: mod_base = cm
  modified_base 9: mod_base = OTHER; note = 2'-Fluoro-cytidine
  modified_base 10: mod_base = um
  modified_base 11: mod_base = cm
  modified_base 12: mod_base = cm
  modified_base 13: mod_base = OTHER; note = 2'-O-methyl-adenosine
  modified_base 14: mod_base = OTHER; note = 2'-Fluoro-adenosine
  modified_base 15: mod_base = OTHER; note = 2'-O-methyl-adenosine
  modified_base 16: mod_base = OTHER; note = 2'-Fluoro-adenosine
  modified_base 17: mod_base = um
  modified_base 18: mod_base = OTHER; note = 2'-O-methyl-adenosine
  modified_base 19: mod_base = cm
  modified_base 20: mod_base = um
  modified_base 21: mod_base = gm
  modified_base 21^22: mod_base = OTHER; note = Phosphorothioate bond
  modified_base 22: mod_base = OTHER; note = 2'-O-methyl-adenosine
  modified_base 22^23: mod_base = OTHER; note = Phosphorothioate bond
  modified_base 23: mod_base = OTHER; note = 2'-O-methyl-adenosine
agagacacctccaaaatactgaa

SEQ ID NO: 510 - RNA, 23 nt, synthetic construct
  source 1..23: mol_type = other RNA
  modified_base 1: mod_base = OTHER; note = 2'-O-methyl-adenosine
  modified_base 1^2: mod_base = OTHER; note = Phosphorothioate bond
  modified_base 2: mod_base = OTHER; note = 2'-Fluoro-uridine
  modified_base 2^3: mod_base = OTHER; note = Phosphorothioate bond
  modified_base 3: mod_base = OTHER; note = 2'-O-methyl-adenosine
  modified_base 4: mod_base = cm
  modified_base 5: mod_base = OTHER; note = 2'-O-methyl-adenosine
  modified_base 6: mod_base = OTHER; note = 2'-Fluoro-uridine
  modified_base 7: mod_base = OTHER; note = 2'-O-methyl-adenosine
  modified_base 8: mod_base = gm
  modified_base 9: mod_base = gm
  modified_base 10: mod_base = OTHER; note = 2'-O-methyl-adenosine
  modified_base 11: mod_base = OTHER; note = 2'-O-methyl-adenosine
  modified_base 12: mod_base = OTHER; note = 2'-O-methyl-adenosine
  modified_base 13: mod_base = um
  modified_base 14: mod_base = OTHER; note = 2'-Fluoro-uridine
  modified_base 15: mod_base = cm
  modified_base 16: mod_base = OTHER; note = 2'-Fluoro-adenosine
  modified_base 17: mod_base = OTHER; note = 2'-O-methyl-adenosine
  modified_base 18: mod_base = OTHER; note = 2'-Fluoro-guanosine
  modified_base 19: mod_base = um
  modified_base 20: mod_base = um
  modified_base 21: mod_base = um
  modified_base 21^22: mod_base = OTHER; note = Phosphorothioate bond
  modified_base 22: mod_base = OTHER; note = 2'-O-methyl-adenosine
  modified_base 22^23: mod_base = OTHER; note = Phosphorothioate bond
  modified_base 23: mod_base = cm
atacataggaaattcaagtttac

SEQ ID NO: 511 - RNA, 23 nt, synthetic construct
  source 1..23: mol_type = other RNA
  modified_base 1: mod_base = OTHER; note = 2'-O-methyl-adenosine
  modified_base 1^2: mod_base = OTHER; note = Phosphorothioate bond
  modified_base 2: mod_base = OTHER; note = 2'-Fluoro-adenosine
  modified_base 2^3: mod_base = OTHER; note = Phosphorothioate bond
  modified_base 3: mod_base = OTHER; note = 2'-O-methyl-adenosine
  modified_base 4: mod_base = OTHER; note = 2'-O-methyl-adenosine
  modified_base 5: mod_base = um
  modified_base 6: mod_base = OTHER; note = 2'-Fluoro-adenosine
  modified_base 7: mod_base = cm
  modified_base 8: mod_base = OTHER; note = 2'-O-methyl-adenosine
  modified_base 9: mod_base = um
  modified_base 10: mod_base = OTHER; note = 2'-O-methyl-adenosine
  modified_base 11: mod_base = gm
  modified_base 12: mod_base = gm
  modified_base 13: mod_base = OTHER; note = 2'-O-methyl-adenosine
  modified_base 14: mod_base = OTHER; note = 2'-Fluoro-adenosine
  modified_base 15: mod_base = OTHER; note = 2'-O-methyl-adenosine
  modified_base 16: mod_base = OTHER; note = 2'-Fluoro-uridine
  modified_base 17: mod_base = um
  modified_base 18: mod_base = OTHER; note = 2'-Fluoro-cytidine
  modified_base 19: mod_base = OTHER; note = 2'-O-methyl-adenosine
  modified_base 20: mod_base = OTHER; note = 2'-O-methyl-adenosine
  modified_base 21: mod_base = gm
  modified_base 21^22: mod_base = OTHER; note = Phosphorothioate bond
  modified_base 22: mod_base = um
  modified_base 22^23: mod_base = OTHER; note = Phosphorothioate bond
  modified_base 23: mod_base = um
aaaatacataggaaattcaagtt

SEQ ID NO: 512 - RNA, 23 nt, synthetic construct
  source 1..23: mol_type = other RNA
  modified_base 1: mod_base = um
  modified_base 1^2: mod_base = OTHER; note = Phosphorothioate bond
  modified_base 2: mod_base = OTHER; note = 2'-Fluoro-uridine
  modified_base 2^3: mod_base = OTHER; note = Phosphorothioate bond
  modified_base 3: mod_base = um
  modified_base 4: mod_base = um
  modified_base 5: mod_base = OTHER; note = 2'-O-methyl-adenosine
  modified_base 6: mod_base = OTHER; note = 2'-Fluoro-adenosine
  modified_base 7: mod_base = gm
  modified_base 8: mod_base = gm
  modified_base 9: mod_base = cm
  modified_base 10: mod_base = OTHER; note = 2'-O-methyl-adenosine
  modified_base 11: mod_base = cm
  modified_base 12: mod_base = um
  modified_base 13: mod_base = um
  modified_base 14: mod_base = OTHER; note = 2'-Fluoro-uridine
  modified_base 15: mod_base = gm
  modified_base 16: mod_base = OTHER; note = 2'-Fluoro-guanosine
  modified_base 17: mod_base = OTHER; note = 2'-O-methyl-adenosine
  modified_base 18: mod_base = OTHER; note = 2'-Fluoro-adenosine
  modified_base 19: mod_base = OTHER; note = 2'-O-methyl-adenosine
  modified_base 20: mod_base = OTHER; note = 2'-O-methyl-adenosine
  modified_base 21: mod_base = gm
  modified_base 21^22: mod_base = OTHER; note = Phosphorothioate bond
  modified_base 22: mod_base = um
  modified_base 22^23: mod_base = OTHER; note = Phosphorothioate bond
  modified_base 23: mod_base = cm
ttttaaggcactttggaaaagtc

SEQ ID NO: 513 - RNA, 23 nt, synthetic construct
  source 1..23: mol_type = other RNA
  modified_base 1: mod_base = OTHER; note = 2'-O-methyl-adenosine
  modified_base 1^2: mod_base = OTHER; note = Phosphorothioate bond
  modified_base 2: mod_base = OTHER; note = 2'-Fluoro-guanosine
  modified_base 2^3: mod_base = OTHER; note = Phosphorothioate bond
  modified_base 3: mod_base = OTHER; note = 2'-O-methyl-adenosine
  modified_base 4: mod_base = gm
  modified_base 5: mod_base = OTHER; note = 2'-O-methyl-adenosine
  modified_base 6: mod_base = OTHER; note = 2'-Fluoro-cytidine
  modified_base 7: mod_base = OTHER; note = 2'-O-methyl-adenosine
  modified_base 8: mod_base = cm
  modified_base 9: mod_base = cm
  modified_base 10: mod_base = um
  modified_base 11: mod_base = cm
  modified_base 12: mod_base = cm
  modified_base 13: mod_base = OTHER; note = 2'-O-methyl-adenosine
  modified_base 14: mod_base = OTHER; note = 2'-Fluoro-adenosine
  modified_base 15: mod_base = OTHER; note = 2'-O-methyl-adenosine
  modified_base 16: mod_base = OTHER; note = 2'-Fluoro-adenosine
  modified_base 17: mod_base = um
  modified_base 18: mod_base = OTHER; note = 2'-Fluoro-adenosine
  modified_base 19: mod_base = cm
  modified_base 20: mod_base = um
  modified_base 21: mod_base = gm
  modified_base 21^22: mod_base = OTHER; note = Phosphorothioate bond
  modified_base 22: mod_base = OTHER; note = 2'-O-methyl-adenosine
  modified_base 22^23: mod_base = OTHER; note = Phosphorothioate bond
  modified_base 23: mod_base = OTHER; note = 2'-O-methyl-adenosine
agagacacctccaaaatactgaa

SEQ ID NO: 514 - RNA, 21 nt, synthetic construct
  source 1..21: mol_type = other RNA
  modified_base 1: mod_base = cm
  modified_base 1^2: mod_base = OTHER; note = Phosphorothioate bond
  modified_base 2: mod_base = um
  modified_base 2^3: mod_base = OTHER; note = Phosphorothioate bond
  modified_base 3: mod_base = um
  modified_base 4: mod_base = gm
  modified_base 5: mod_base = OTHER; note = 2'-O-methyl-adenosine
  modified_base 6: mod_base = OTHER; note = 2'-O-methyl-adenosine
  modified_base 7: mod_base = OTHER; note = 2'-Fluoro-uridine
  modified_base 8: mod_base = um
  modified_base 9: mod_base = OTHER; note = 2'-Fluoro-uridine
  modified_base 10: mod_base = OTHER; note = 2'-Fluoro-cytidine
  modified_base 11: mod_base = OTHER; note = 2'-Fluoro-cytidine
  modified_base 12: mod_base = um
  modified_base 13: mod_base = OTHER; note = 2'-O-methyl-adenosine
  modified_base 14: mod_base = um
  modified_base 15: mod_base = gm
  modified_base 16: mod_base = um
  modified_base 17: mod_base = OTHER; note = 2'-O-methyl-adenosine
  modified_base 18: mod_base = um
  modified_base 19: mod_base = um
  modified_base 20: mod_base = um
  modified_base 21: mod_base = um
cttgaatttcctatgtatttt

SEQ ID NO: 515 - RNA, 21 nt, synthetic construct
  source 1..21: mol_type = other RNA
  modified_base 1: mod_base = gm
  modified_base 1^2: mod_base = OTHER; note = Phosphorothioate bond
  modified_base 2: mod_base = um
  modified_base 2^3: mod_base = OTHER; note = Phosphorothioate bond
  modified_base 3: mod_base = gm
  modified_base 4: mod_base = cm
  modified_base 5: mod_base = um
  modified_base 6: mod_base = gm
  modified_base 7: mod_base = OTHER; note = 2'-Fluoro-guanosine
  modified_base 8: mod_base = OTHER; note = 2'-O-methyl-adenosine
  modified_base 9: mod_base = OTHER; note = 2'-Fluoro-uridine
  modified_base 10: mod_base = OTHER; note = 2'-Fluoro-guanosine
  modified_base 11: mod_base = OTHER; note = 2'-Fluoro-uridine
  modified_base 12: mod_base = OTHER; note = 2'-O-methyl-adenosine
  modified_base 13: mod_base = cm
  modified_base 14: mod_base = OTHER; note = 2'-O-methyl-adenosine
  modified_base 15: mod_base = gm
  modified_base 16: mod_base = OTHER; note = 2'-O-methyl-adenosine
  modified_base 17: mod_base = gm
  modified_base 18: mod_base = OTHER; note = 2'-O-methyl-adenosine
  modified_base 19: mod_base = um
  modified_base 20: mod_base = OTHER; note = 2'-O-methyl-adenosine
  modified_base 21: mod_base = cm
gtgctggatgtacagagatac

SEQ ID NO: 516 - RNA, 21 nt, synthetic construct
  source 1..21: mol_type = other RNA
  modified_base 1: mod_base = um
  modified_base 1^2: mod_base = OTHER; note = Phosphorothioate bond
  modified_base 2: mod_base = um
  modified_base 2^3: mod_base = OTHER; note = Phosphorothioate bond
  modified_base 3: mod_base = cm
  modified_base 4: mod_base = cm
  modified_base 5: mod_base = OTHER; note = 2'-O-methyl-adenosine
  modified_base 6: mod_base = OTHER; note = 2'-O-methyl-adenosine
  modified_base 7: mod_base = OTHER; note = 2'-Fluoro-adenosine
  modified_base 8: mod_base = gm
  modified_base 9: mod_base = OTHER; note = 2'-Fluoro-uridine
  modified_base 10: mod_base = OTHER; note = 2'-Fluoro-guanosine
  modified_base 11: mod_base = OTHER; note = 2'-Fluoro-cytidine
  modified_base 12: mod_base = cm
  modified_base 13: mod_base = um
  modified_base 14: mod_base = um
  modified_base 15: mod_base = OTHER; note = 2'-O-methyl-adenosine
  modified_base 16: mod_base = OTHER; note = 2'-O-methyl-adenosine
  modified_base 17: mod_base = OTHER; note = 2'-O-methyl-adenosine
  modified_base 18: mod_base = OTHER; note = 2'-O-methyl-adenosine
  modified_base 19: mod_base = gm
  modified_base 20: mod_base = OTHER; note = 2'-O-methyl-adenosine
  modified_base 21: mod_base = OTHER; note = 2'-O-methyl-adenosine
ttccaaagtgccttaaaagaa

SEQ ID NO: 517 - RNA, 21 nt, synthetic construct
  source 1..21: mol_type = other RNA
  modified_base 1: mod_base = gm
  modified_base 1^2: mod_base = OTHER; note = Phosphorothioate bond
  modified_base 2: mod_base = cm
  modified_base 2^3: mod_base = OTHER; note = Phosphorothioate bond
  modified_base 3: mod_base = um
  modified_base 4: mod_base = OTHER; note = 2'-O-methyl-adenosine
  modified_base 5: mod_base = um
  modified_base 6: mod_base = gm
  modified_base 7: mod_base = OTHER; note = 2'-Fluoro-uridine
  modified_base 8: mod_base = OTHER; note = 2'-O-methyl-adenosine
  modified_base 9: mod_base = OTHER; note = 2'-Fluoro-adenosine
  modified_base 10: mod_base = OTHER; note = 2'-Fluoro-adenosine
  modified_base 11: mod_base = OTHER; note = 2'-Fluoro-cytidine
  modified_base 12: mod_base = um
  modified_base 13: mod_base = um
  modified_base 14: mod_base = gm
  modified_base 15: mod_base = OTHER; note = 2'-O-methyl-adenosine
  modified_base 16: mod_base = OTHER; note = 2'-O-methyl-adenosine
  modified_base 17: mod_base = um
  modified_base 18: mod_base = um
  modified_base 19: mod_base = um
  modified_base 20: mod_base = cm
  modified_base 21: mod_base = cm
gctatgtaaacttgaatttcc

SEQ ID NO: 518 - RNA, 21 nt, synthetic construct
  source 1..21: mol_type = other RNA
  modified_base 1: mod_base = OTHER; note = 2'-O-methyl-adenosine
  modified_base 1^2: mod_base = OTHER; note = Phosphorothioate bond
  modified_base 2: mod_base = cm
  modified_base 2^3: mod_base = OTHER; note = Phosphorothioate bond
  modified_base 3: mod_base = gm
  modified_base 4: mod_base = gm
  modified_base 5: mod_base = cm
  modified_base 6: mod_base = OTHER; note = 2'-O-methyl-adenosine
  modified_base 7: mod_base = OTHER; note = 2'-Fluoro-cytidine
  modified_base 8: mod_base = OTHER; note = 2'-O-methyl-adenosine
  modified_base 9: mod_base = OTHER; note = 2'-Fluoro-uridine
  modified_base 10: mod_base = OTHER; note = 2'-Fluoro-uridine
  modified_base 11: mod_base = OTHER; note = 2'-Fluoro-uridine
  modified_base 12: mod_base = cm
  modified_base 13: mod_base = cm
  modified_base 14: mod_base = gm
  modified_base 15: mod_base = um
  modified_base 16: mod_base = um
  modified_base 17: mod_base = gm
  modified_base 18: mod_base = cm
  modified_base 19: mod_base = OTHER; note = 2'-O-methyl-adenosine
  modified_base 20: mod_base = OTHER; note = 2'-O-methyl-adenosine
  modified_base 21: mod_base = um
acggcacatttccgttgcaat

SEQ ID NO: 519 - RNA, 21 nt, synthetic construct
  source 1..21: mol_type = other RNA
  modified_base 1: mod_base = cm
  modified_base 1^2: mod_base = OTHER; note = Phosphorothioate bond
  modified_base 2: mod_base = um
  modified_base 2^3: mod_base = OTHER; note = Phosphorothioate bond
  modified_base 3: mod_base = OTHER; note = 2'-O-methyl-adenosine
  modified_base 4: mod_base = um
  modified_base 5: mod_base = gm
  modified_base 6: mod_base = um
  modified_base 7: mod_base = OTHER; note = 2'-Fluoro-adenosine
  modified_base 8: mod_base = OTHER; note = 2'-O-methyl-adenosine
  modified_base 9: mod_base = OTHER; note = 2'-Fluoro-adenosine
  modified_base 10: mod_base = OTHER; note = 2'-Fluoro-cytidine
  modified_base 11: mod_base = OTHER; note = 2'-Fluoro-uridine
  modified_base 12: mod_base = um
  modified_base 13: mod_base = gm
  modified_base 14: mod_base = OTHER; note = 2'-O-methyl-adenosine
  modified_base 15: mod_base = OTHER; note = 2'-O-methyl-adenosine
  modified_base 16: mod_base = um
  modified_base 17: mod_base = um
  modified_base 18: mod_base = um
  modified_base 19: mod_base = cm
  modified_base 20: mod_base = cm
  modified_base 21: mod_base = um
ctatgtaaacttgaatttcct

SEQ ID NO: 520 - RNA, 21 nt, synthetic construct
  source 1..21: mol_type = other RNA
  modified_base 1: mod_base = cm
  modified_base 1^2: mod_base = OTHER; note = Phosphorothioate bond
  modified_base 2: mod_base = OTHER; note = 2'-O-methyl-adenosine
  modified_base 2^3: mod_base = OTHER; note = Phosphorothioate bond
  modified_base 3: mod_base = OTHER; note = 2'-O-methyl-adenosine
  modified_base 4: mod_base = um
  modified_base 5: mod_base = gm
  modified_base 6: mod_base = gm
  modified_base 7: mod_base = OTHER; note = 2'-Fluoro-adenosine
  modified_base 8: mod_base = um
  modified_base 9: mod_base = OTHER; note = 2'-Fluoro-uridine
  modified_base 10: mod_base = OTHER; note = 2'-Fluoro-uridine
  modified_base 11: mod_base = OTHER; note = 2'-Fluoro-cytidine
  modified_base 12: mod_base = cm
  modified_base 13: mod_base = um
  modified_base 14: mod_base = OTHER; note = 2'-O-methyl-adenosine
  modified_base 15: mod_base = OTHER; note = 2'-O-methyl-adenosine
  modified_base 16: mod_base = um
  modified_base 17: mod_base = OTHER; note = 2'-O-methyl-adenosine
  modified_base 18: mod_base = OTHER; note = 2'-O-methyl-adenosine
  modified_base 19: mod_base = um
  modified_base 20: mod_base = um
  modified_base 21: mod_base = OTHER; note = 2'-O-methyl-adenosine
caatggatttcctaataatta

SEQ ID NO: 521 - RNA, 21 nt, synthetic construct
  source 1..21: mol_type = other RNA
  modified_base 1: mod_base = gm
  modified_base 1^2: mod_base = OTHER; note = Phosphorothioate bond
  modified_base 2: mod_base = gm
  modified_base 2^3: mod_base = OTHER; note = Phosphorothioate bond
  modified_base 3: mod_base = um
  modified_base 4: mod_base = gm
  modified_base 5: mod_base = um
  modified_base 6: mod_base = cm
  modified_base 7: mod_base = OTHER; note = 2'-Fluoro-uridine
  modified_base 8: mod_base = cm
  modified_base 9: mod_base = OTHER; note = 2'-Fluoro-uridine
  modified_base 10: mod_base = OTHER; note = 2'-Fluoro-guanosine
  modified_base 11: mod_base = OTHER; note = 2'-Fluoro-cytidine
  modified_base 12: mod_base = um
  modified_base 13: mod_base = cm
  modified_base 14: mod_base = um
  modified_base 15: mod_base = OTHER; note = 2'-O-methyl-adenosine
  modified_base 16: mod_base = OTHER; note = 2'-O-methyl-adenosine
  modified_base 17: mod_base = gm
  modified_base 18: mod_base = um
  modified_base 19: mod_base = OTHER; note = 2'-O-methyl-adenosine
  modified_base 20: mod_base = OTHER; note = 2'-O-methyl-adenosine
  modified_base 21: mod_base = OTHER; note = 2'-O-methyl-adenosine
ggtgtctctgctctaagtaaa

SEQ ID NO: 522 - RNA, 21 nt, synthetic construct
  source 1..21: mol_type = other RNA
  modified_base 1: mod_base = um
  modified_base 1^2: mod_base = OTHER; note = Phosphorothioate bond
  modified_base 2: mod_base = cm
  modified_base 2^3: mod_base = OTHER; note = Phosphorothioate bond
  modified_base 3: mod_base = cm
  modified_base 4: mod_base = OTHER; note = 2'-O-methyl-adenosine
  modified_base 5: mod_base = OTHER; note = 2'-O-methyl-adenosine
  modified_base 6: mod_base = OTHER; note = 2'-O-methyl-adenosine
  modified_base 7: mod_base = OTHER; note = 2'-Fluoro-guanosine
  modified_base 8: mod_base = um
  modified_base 9: mod_base = OTHER; note = 2'-Fluoro-guanosine
  modified_base 10: mod_base = OTHER; note = 2'-Fluoro-cytidine
  modified_base 11: mod_base = OTHER; note = 2'-Fluoro-cytidine
  modified_base 12: mod_base = um
  modified_base 13: mod_base = um
  modified_base 14: mod_base = OTHER; note = 2'-O-methyl-adenosine
  modified_base 15: mod_base = OTHER; note = 2'-O-methyl-adenosine
  modified_base 16: mod_base = OTHER; note = 2'-O-methyl-adenosine
  modified_base 17: mod_base = OTHER; note = 2'-O-methyl-adenosine
  modified_base 18: mod_base = gm
  modified_base 19: mod_base = OTHER; note = 2'-O-methyl-adenosine
  modified_base 20: mod_base = OTHER; note = 2'-O-methyl-adenosine
  modified_base 21: mod_base = OTHER; note = 2'-O-methyl-adenosine
tccaaagtgccttaaaagaaa

SEQ ID NO: 523 - RNA, 21 nt, synthetic construct
  source 1..21: mol_type = other RNA
  modified_base 1: mod_base = cm
  modified_base 1^2: mod_base = OTHER; note = Phosphorothioate bond
  modified_base 2: mod_base = OTHER; note = 2'-O-methyl-adenosine
  modified_base 2^3: mod_base = OTHER; note = Phosphorothioate bond
  modified_base 3: mod_base = um
  modified_base 4: mod_base = gm
  modified_base 5: mod_base = OTHER; note = 2'-O-methyl-adenosine
  modified_base 6: mod_base = OTHER; note = 2'-O-methyl-adenosine
  modified_base 7: mod_base = OTHER; note = 2'-Fluoro-uridine
  modified_base 8: mod_base = gm
  modified_base 9: mod_base = OTHER; note = 2'-Fluoro-uridine
  modified_base 10: mod_base = OTHER; note = 2'-Fluoro-guanosine
  modified_base 11: mod_base = OTHER; note = 2'-Fluoro-cytidine
  modified_base 12: mod_base = cm
  modified_base 13: mod_base = um
  modified_base 14: mod_base = um
  modified_base 15: mod_base = um
  modified_base 16: mod_base = um
  modified_base 17: mod_base = OTHER; note = 2'-O-methyl-adenosine
  modified_base 18: mod_base = OTHER; note = 2'-O-methyl-adenosine
  modified_base 19: mod_base = um
  modified_base 20: mod_base = um
  modified_base 21: mod_base = OTHER; note = 2'-O-methyl-adenosine
catgaatgtgccttttaatta

SEQ ID NO: 524 - RNA, 21 nt, synthetic construct
  source 1..21: mol_type = other RNA
  modified_base 1: mod_base = OTHER; note = 2'-O-methyl-adenosine
  modified_base 1^2: mod_base = OTHER; note = Phosphorothioate bond
  modified_base 2: mod_base = OTHER; note = 2'-O-methyl-adenosine
  modified_base 2^3: mod_base = OTHER; note = Phosphorothioate bond
  modified_base 3: mod_base = OTHER; note = 2'-O-methyl-adenosine
  modified_base 4: mod_base = cm
  modified_base 5: mod_base = um
  modified_base 6: mod_base = um
  modified_base 7: mod_base = OTHER; note = 2'-Fluoro-guanosine
  modified_base 8: mod_base = OTHER; note = 2'-O-methyl-adenosine
  modified_base 9: mod_base = OTHER; note = 2'-Fluoro-adenosine
  modified_base 10: mod_base = OTHER; note = 2'-Fluoro-uridine
  modified_base 11: mod_base = OTHER; note = 2'-Fluoro-uridine
  modified_base 12: mod_base = um
  modified_base 13: mod_base = cm
  modified_base 14: mod_base = cm
  modified_base 15: mod_base = um
  modified_base 16: mod_base = OTHER; note = 2'-O-methyl-adenosine
  modified_base 17: mod_base = um
  modified_base 18: mod_base = gm
  modified_base 19: mod_base = um
  modified_base 20: mod_base = OTHER; note = 2'-O-methyl-adenosine
  modified_base 21: mod_base = um
aaacttgaatttcctatgtat

SEQ ID NO: 525 - RNA, 21 nt, synthetic construct
  source 1..21: mol_type = other RNA
  modified_base 1: mod_base = um
  modified_base 1^2: mod_base = OTHER; note = Phosphorothioate bond
  modified_base 2: mod_base = cm
  modified_base 2^3: mod_base = OTHER; note = Phosphorothioate bond
  modified_base 3: mod_base = cm
  modified_base 4: mod_base = um
  modified_base 5: mod_base = gm
  modified_base 6: mod_base = OTHER; note = 2'-O-methyl-adenosine
  modified_base 7: mod_base = OTHER; note = 2'-Fluoro-cytidine
  modified_base 8: mod_base = um
  modified_base 9: mod_base = OTHER; note = 2'-Fluoro-uridine
  modified_base 10: mod_base = OTHER; note = 2'-Fluoro-uridine
  modified_base 11: mod_base = OTHER; note = 2'-Fluoro-uridine
  modified_base 12: mod_base = cm
  modified_base 13: mod_base = cm
  modified_base 14: mod_base = OTHER; note = 2'-O-methyl-adenosine
  modified_base 15: mod_base = OTHER; note = 2'-O-methyl-adenosine
  modified_base 16: mod_base = OTHER; note = 2'-O-methyl-adenosine
  modified_base 17: mod_base = gm
  modified_base 18: mod_base = um
  modified_base 19: mod_base = gm
  modified_base 20: mod_base = cm
  modified_base 21: mod_base = cm
tcctgacttttccaaagtgcc

SEQ ID NO: 526 - RNA, 21 nt, synthetic construct
  source 1..21: mol_type = other RNA
  modified_base 1: mod_base = OTHER; note = 2'-O-methyl-adenosine
  modified_base 1^2: mod_base = OTHER; note = Phosphorothioate bond
  modified_base 2: mod_base = um
  modified_base 2^3: mod_base = OTHER; note = Phosphorothioate bond
  modified_base 3: mod_base = cm
  modified_base 4: mod_base = OTHER; note = 2'-O-methyl-adenosine
  modified_base 5: mod_base = OTHER; note = 2'-O-methyl-adenosine
  modified_base 6: mod_base = um
  modified_base 7: mod_base = OTHER; note = 2'-Fluoro-guanosine
  modified_base 8: mod_base = gm
  modified_base 9: mod_base = OTHER; note = 2'-Fluoro-adenosine
  modified_base 10: mod_base = OTHER; note = 2'-Fluoro-uridine
  modified_base 11: mod_base = OTHER; note = 2'-Fluoro-uridine
  modified_base 12: mod_base = um
  modified_base 13: mod_base = cm
  modified_base 14: mod_base = cm
  modified_base 15: mod_base = um
  modified_base 16: mod_base = OTHER; note = 2'-O-methyl-adenosine
  modified_base 17: mod_base = OTHER; note = 2'-O-methyl-adenosine
  modified_base 18: mod_base = um
  modified_base 19: mod_base = OTHER; note = 2'-O-methyl-adenosine
  modified_base 20: mod_base = OTHER; note = 2'-O-methyl-adenosine
  modified_base 21: mod_base = um
atcaatggatttcctaataat

SEQ ID NO: 527 - RNA, 21 nt, synthetic construct
  source 1..21: mol_type = other RNA
  modified_base 1: mod_base = um
  modified_base 1^2: mod_base = OTHER; note = Phosphorothioate bond
  modified_base 2: mod_base = gm
  modified_base 2^3: mod_base = OTHER; note = Phosphorothioate bond
  modified_base 3: mod_base = um
  modified_base 4: mod_base = um
  modified_base 5: mod_base = cm
  modified_base 6: mod_base = OTHER; note = 2'-O-methyl-adenosine
  modified_base 7: mod_base = OTHER; note = 2'-Fluoro-guanosine
  modified_base 8: mod_base = um
  modified_base 9: mod_base = OTHER; note = 2'-Fluoro-adenosine
  modified_base 10: mod_base = OTHER; note = 2'-Fluoro-uridine
  modified_base 11: mod_base = OTHER; note = 2'-Fluoro-uridine
  modified_base 12: mod_base = um
  modified_base 13: mod_base = um
  modified_base 14: mod_base = gm
  modified_base 15: mod_base = gm
  modified_base 16: mod_base = OTHER; note = 2'-O-methyl-adenosine
  modified_base 17: mod_base = gm
  modified_base 18: mod_base = gm
  modified_base 19: mod_base = um
  modified_base 20: mod_base = gm
  modified_base 21: mod_base = um
tgttcagtattttggaggtgt

SEQ ID NO: 528 - RNA, 21 nt, synthetic construct
  source 1..21: mol_type = other RNA
  modified_base 1: mod_base = OTHER; note = 2'-O-methyl-adenosine
  modified_base 1^2: mod_base = OTHER; note = Phosphorothioate bond
  modified_base 2: mod_base = um
  modified_base 2^3: mod_base = OTHER; note = Phosphorothioate bond
  modified_base 3: mod_base = cm
  modified_base 4: mod_base = cm
  modified_base 5: mod_base = um
  modified_base 6: mod_base = gm
  modified_base 7: mod_base = OTHER; note = 2'-Fluoro-adenosine
  modified_base 8: mod_base = cm
  modified_base 9: mod_base = OTHER; note = 2'-Fluoro-uridine
  modified_base 10: mod_base = OTHER; note = 2'-Fluoro-uridine
  modified_base 11: mod_base = OTHER; note = 2'-Fluoro-uridine
  modified_base 12: mod_base = um
  modified_base 13: mod_base = cm
  modified_base 14: mod_base = cm
  modified_base 15: mod_base = OTHER; note = 2'-O-methyl-adenosine
  modified_base 16: mod_base = OTHER; note = 2'-O-methyl-adenosine
  modified_base 17: mod_base = OTHER; note = 2'-O-methyl-adenosine
  modified_base 18: mod_base = gm
  modified_base 19: mod_base = um
  modified_base 20: mod_base = gm
  modified_base 21: mod_base = cm
atcctgacttttccaaagtgc

SEQ ID NO: 529 - RNA, 21 nt, synthetic construct
  source 1..21: mol_type = other RNA
  modified_base 1: mod_base = OTHER; note = 2'-O-methyl-adenosine
  modified_base 1^2: mod_base = OTHER; note = Phosphorothioate bond
  modified_base 2: mod_base = um
  modified_base 2^3: mod_base = OTHER; note = Phosphorothioate bond
  modified_base 3: mod_base = gm
  modified_base 4: mod_base = gm
  modified_base 5: mod_base = OTHER; note = 2'-O-methyl-adenosine
  modified_base 6: mod_base = um
  modified_base 7: mod_base = OTHER; note = 2'-Fluoro-uridine
  modified_base 8: mod_base = um
  modified_base 9: mod_base = OTHER; note = 2'-Fluoro-cytidine
  modified_base 10: mod_base = OTHER; note = 2'-Fluoro-cytidine
  modified_base 11: mod_base = OTHER; note = 2'-Fluoro-uridine
  modified_base 12: mod_base = OTHER; note = 2'-O-methyl-adenosine
  modified_base 13: mod_base = OTHER; note = 2'-O-methyl-adenosine
  modified_base 14: mod_base = um
  modified_base 15: mod_base = OTHER; note = 2'-O-methyl-adenosine
  modified_base 16: mod_base = OTHER; note = 2'-O-methyl-adenosine
  modified_base 17: mod_base = um
  modified_base 18: mod_base = um
  modified_base 19: mod_base = OTHER; note = 2'-O-methyl-adenosine
  modified_base 20: mod_base = um
  modified_base 21: mod_base = um
atggatttcctaataattatt

SEQ ID NO: 530 - RNA, 21 nt, synthetic construct
  source 1..21: mol_type = other RNA
  modified_base 1: mod_base = OTHER; note = 2'-O-methyl-adenosine
  modified_base 1^2: mod_base = OTHER; note = Phosphorothioate bond
  modified_base 2: mod_base = gm
  modified_base 2^3: mod_base = OTHER; note = Phosphorothioate bond
  modified_base 3: mod_base = cm
  modified_base 4: mod_base = OTHER; note = 2'-O-methyl-adenosine
  modified_base 5: mod_base = um
  modified_base 6: mod_base = gm
  modified_base 7: mod_base = OTHER; note = 2'-Fluoro-adenosine
  modified_base 8: mod_base = OTHER; note = 2'-O-methyl-adenosine
  modified_base 9: mod_base = OTHER; note = 2'-Fluoro-uridine
  modified_base 10: mod_base = OTHER; note = 2'-Fluoro-guanosine
  modified_base 11: mod_base = OTHER; note = 2'-Fluoro-uridine
  modified_base 12: mod_base = gm
  modified_base 13: mod_base = cm
  modified_base 14: mod_base = cm
  modified_base 15: mod_base = um
  modified_base 16: mod_base = um
  modified_base 17: mod_base = um
  modified_base 18: mod_base = um
  modified_base 19: mod_base = OTHER; note = 2'-O-methyl-adenosine
  modified_base 20: mod_base = OTHER; note = 2'-O-methyl-adenosine
  modified_base 21: mod_base = um
agcatgaatgtgccttttaat

SEQ ID NO: 531 - RNA, 21 nt, synthetic construct
  source 1..21: mol_type = other RNA
  modified_base 1: mod_base = um
  modified_base 1^2: mod_base = OTHER; note = Phosphorothioate bond
  modified_base 2: mod_base = gm
  modified_base 2^3: mod_base = OTHER; note = Phosphorothioate bond
  modified_base 3: mod_base = um
  modified_base 4: mod_base = cm
  modified_base 5: mod_base = um
  modified_base 6: mod_base = cm
  modified_base 7: mod_base = OTHER; note = 2'-Fluoro-uridine
  modified_base 8: mod_base = gm
  modified_base 9: mod_base = OTHER; note = 2'-Fluoro-cytidine
  modified_base 10: mod_base = OTHER; note = 2'-Fluoro-uridine
  modified_base 11: mod_base = OTHER; note = 2'-Fluoro-cytidine
  modified_base 12: mod_base = um
  modified_base 13: mod_base = OTHER; note = 2'-O-methyl-adenosine
  modified_base 14: mod_base = OTHER; note = 2'-O-methyl-adenosine
  modified_base 15: mod_base = gm
  modified_base 16: mod_base = um
  modified_base 17: mod_base = OTHER; note = 2'-O-methyl-adenosine
  modified_base 18: mod_base = OTHER; note = 2'-O-methyl-adenosine
  modified_base 19: mod_base = OTHER; note = 2'-O-methyl-adenosine
  modified_base 20: mod_base = cm
  modified_base 21: mod_base = OTHER; note = 2'-O-methyl-adenosine
tgtctctgctctaagtaaaca

SEQ ID NO: 532 - RNA, 21 nt, synthetic construct
  source 1..21: mol_type = other RNA
  modified_base 1: mod_base = OTHER; note = 2'-O-methyl-adenosine
  modified_base 1^2: mod_base = OTHER; note = Phosphorothioate bond
  modified_base 2: mod_base = um
  modified_base 2^3: mod_base = OTHER; note = Phosphorothioate bond
  modified_base 3: mod_base = gm
  modified_base 4: mod_base = um
  modified_base 5: mod_base = um
  modified_base 6: mod_base = cm
  modified_base 7: mod_base = OTHER; note = 2'-Fluoro-adenosine
  modified_base 8: mod_base = gm
  modified_base 9: mod_base = OTHER; note = 2'-Fluoro-uridine
  modified_base 10: mod_base = OTHER; note = 2'-Fluoro-adenosine
  modified_base 11: mod_base = OTHER; note = 2'-Fluoro-uridine
  modified_base 12: mod_base = um
  modified_base 13: mod_base = um
  modified_base 14: mod_base = um
  modified_base 15: mod_base = gm
  modified_base 16: mod_base = gm
  modified_base 17: mod_base = OTHER; note = 2'-O-methyl-adenosine
  modified_base 18: mod_base = gm
  modified_base 19: mod_base = gm
  modified_base 20: mod_base = um
  modified_base 21: mod_base = gm
atgttcagtattttggaggtg

SEQ ID NO: 533 - RNA, 21 nt, synthetic construct
  source 1..21: mol_type = other RNA
  modified_base 1: mod_base = gm
  modified_base 1^2: mod_base = OTHER; note = Phosphorothioate bond
  modified_base 2: mod_base = OTHER; note = 2'-O-methyl-adenosine
  modified_base 2^3: mod_base = OTHER; note = Phosphorothioate bond
  modified_base 3: mod_base = um
  modified_base 4: mod_base = cm
  modified_base 5: mod_base = cm
  modified_base 6: mod_base = um
  modified_base 7: mod_base = OTHER; note = 2'-Fluoro-guanosine
  modified_base 8: mod_base = OTHER; note = 2'-O-methyl-adenosine
  modified_base 9: mod_base = OTHER; note = 2'-Fluoro-cytidine
  modified_base 10: mod_base = OTHER; note = 2'-Fluoro-uridine
  modified_base 11: mod_base = OTHER; note = 2'-Fluoro-uridine
  modified_base 12: mod_base = um
  modified_base 13: mod_base = um
  modified_base 14: mod_base = cm
  modified_base 15: mod_base = cm
  modified_base 16: mod_base = OTHER; note = 2'-O-methyl-adenosine
  modified_base 17: mod_base = OTHER; note = 2'-O-methyl-adenosine
  modified_base 18: mod_base = OTHER; note = 2'-O-methyl-adenosine
  modified_base 19: mod_base = gm
  modified_base 20: mod_base = um
  modified_base 21: mod_base = gm
gatcctgacttttccaaagtg

SEQ ID NO: 534 - RNA, 21 nt, synthetic construct
  source 1..21: mol_type = other RNA
  modified_base 1: mod_base = OTHER; note = 2'-O-methyl-adenosine
  modified_base 1^2: mod_base = OTHER; note = Phosphorothioate bond
  modified_base 2: mod_base = um
  modified_base 2^3: mod_base = OTHER; note = Phosphorothioate bond
  modified_base 3: mod_base = gm
  modified_base 4: mod_base = cm
  modified_base 5: mod_base = um
  modified_base 6: mod_base = OTHER; note = 2'-O-methyl-adenosine
  modified_base 7: mod_base = OTHER; note = 2'-Fluoro-uridine
  modified_base 8: mod_base = gm
  modified_base 9: mod_base = OTHER; note = 2'-Fluoro-uridine
  modified_base 10: mod_base = OTHER; note = 2'-Fluoro-adenosine
  modified_base 11: mod_base = OTHER; note = 2'-Fluoro-adenosine
  modified_base 12: mod_base = OTHER; note = 2'-O-methyl-adenosine
  modified_base 13: mod_base = cm
  modified_base 14: mod_base = um
  modified_base 15: mod_base = um
  modified_base 16: mod_base = gm
  modified_base 17: mod_base = OTHER; note = 2'-O-methyl-adenosine
  modified_base 18: mod_base = OTHER; note = 2'-O-methyl-adenosine
  modified_base 19: mod_base = um
  modified_base 20: mod_base = um
  modified_base 21: mod_base = um
atgctatgtaaacttgaattt

SEQ ID NO: 535 - RNA, 21 nt, synthetic construct
  source 1..21: mol_type = other RNA
  modified_base 1: mod_base = gm
  modified_base 1^2: mod_base = OTHER; note = Phosphorothioate bond
  modified_base 2: mod_base = cm
  modified_base 2^3: mod_base = OTHER; note = Phosphorothioate bond
  modified_base 3: mod_base = um
  modified_base 4: mod_base = cm
  modified_base 5: mod_base = um
  modified_base 6: mod_base = OTHER; note = 2'-O-methyl-adenosine
  modified_base 7: mod_base = OTHER; note = 2'-Fluoro-adenosine
  modified_base 8: mod_base = gm
  modified_base 9: mod_base = OTHER; note = 2'-Fluoro-uridine
  modified_base 10: mod_base = OTHER; note = 2'-Fluoro-adenosine
  modified_base 11: mod_base = OTHER; note = 2'-Fluoro-adenosine
  modified_base 12: mod_base = OTHER; note = 2'-O-methyl-adenosine
  modified_base 13: mod_base = cm
  modified_base 14: mod_base = OTHER; note = 2'-O-methyl-adenosine
  modified_base 15: mod_base = OTHER; note = 2'-O-methyl-adenosine
  modified_base 16: mod_base = cm
  modified_base 17: mod_base = OTHER; note = 2'-O-methyl-adenosine
  modified_base 18: mod_base = gm
  modified_base 19: mod_base = um
  modified_base 20: mod_base = um
  modified_base 21: mod_base = um
gctctaagtaaacaacagttt

SEQ ID NO: 536 - RNA, 21 nt, synthetic construct
  source 1..21: mol_type = other RNA
  modified_base 1: mod_base = gm
  modified_base 1^2: mod_base = OTHER; note = Phosphorothioate bond
  modified_base 2: mod_base = cm
  modified_base 2^3: mod_base = OTHER; note = Phosphorothioate bond
  modified_base 3: mod_base = um
  modified_base 4: mod_base = gm
  modified_base 5: mod_base = gm
  modified_base 6: mod_base = OTHER; note = 2'-O-methyl-adenosine
  modified_base 7: mod_base = OTHER; note = 2'-Fluoro-uridine
  modified_base 8: mod_base = gm
  modified_base 9: mod_base = OTHER; note = 2'-Fluoro-uridine
  modified_base 10: mod_base = OTHER; note = 2'-Fluoro-adenosine
  modified_base 11: mod_base = OTHER; note = 2'-Fluoro-cytidine
  modified_base 12: mod_base = OTHER; note = 2'-O-methyl-adenosine
  modified_base 13: mod_base = gm
  modified_base 14: mod_base = OTHER; note = 2'-O-methyl-adenosine
  modified_base 15: mod_base = gm
  modified_base 16: mod_base = OTHER; note = 2'-O-methyl-adenosine
  modified_base 17: mod_base = um
  modified_base 18: mod_base = OTHER; note = 2'-O-methyl-adenosine
  modified_base 19: mod_base = cm
  modified_base 20: mod_base = cm
  modified_base 21: mod_base = cm
gctggatgtacagagataccc

SEQ ID NO: 537 - RNA, 21 nt, synthetic construct
  source 1..21: mol_type = other RNA
  modified_base 1: mod_base = um
  modified_base 1^2: mod_base = OTHER; note = Phosphorothioate bond
  modified_base 2: mod_base = cm
  modified_base 2^3: mod_base = OTHER; note = Phosphorothioate bond
  modified_base 3: mod_base = um
  modified_base 4: mod_base = cm
  modified_base 5: mod_base = um
  modified_base 6: mod_base = gm
  modified_base 7: mod_base = OTHER; note = 2'-Fluoro-cytidine
  modified_base 8: mod_base = um
  modified_base 9: mod_base = OTHER; note = 2'-Fluoro-cytidine
  modified_base 10: mod_base = OTHER; note = 2'-Fluoro-uridine
  modified_base 11: mod_base = OTHER; note = 2'-Fluoro-adenosine
  modified_base 12: mod_base = OTHER; note = 2'-O-methyl-adenosine
  modified_base 13: mod_base = gm
  modified_base 14: mod_base = um
  modified_base 15: mod_base = OTHER; note = 2'-O-methyl-adenosine
  modified_base 16: mod_base = OTHER; note = 2'-O-methyl-adenosine
  modified_base 17: mod_base = OTHER; note = 2'-O-methyl-adenosine
  modified_base 18: mod_base = cm
  modified_base 19: mod_base = OTHER; note = 2'-O-methyl-adenosine
  modified_base 20: mod_base = OTHER; note = 2'-O-methyl-adenosine
  modified_base 21: mod_base = cm
tctctgctctaagtaaacaac

SEQ ID NO: 538 - RNA, 21 nt, synthetic construct
  source 1..21: mol_type = other RNA
  modified_base 1: mod_base = um
  modified_base 1^2: mod_base = OTHER; note = Phosphorothioate bond
  modified_base 2: mod_base = OTHER; note = 2'-O-methyl-adenosine
  modified_base 2^3: mod_base = OTHER; note = Phosphorothioate bond
  modified_base 3: mod_base = um
  modified_base 4: mod_base = gm
  modified_base 5: mod_base = um
  modified_base 6: mod_base = OTHER; note = 2'-O-methyl-adenosine
  modified_base 7: mod_base = OTHER; note = 2'-Fluoro-adenosine
  modified_base 8: mod_base = OTHER; note = 2'-O-methyl-adenosine
  modified_base 9: mod_base = OTHER; note = 2'-Fluoro-cytidine
  modified_base 10: mod_base = OTHER; note = 2'-Fluoro-uridine
  modified_base 11: mod_base = OTHER; note = 2'-Fluoro-uridine
  modified_base 12: mod_base = gm
  modified_base 13: mod_base = OTHER; note = 2'-O-methyl-adenosine
  modified_base 14: mod_base = OTHER; note = 2'-O-methyl-adenosine
  modified_base 15: mod_base = um
  modified_base 16: mod_base = um
  modified_base 17: mod_base = um
  modified_base 18: mod_base = cm
  modified_base 19: mod_base = cm
  modified_base 20: mod_base = um
  modified_base 21: mod_base = OTHER; note = 2'-O-methyl-adenosine
tatgtaaacttgaatttccta

SEQ ID NO: 539 - RNA, 21 nt, synthetic construct
  source 1..21: mol_type = other RNA
  modified_base 1: mod_base = um
  modified_base 1^2: mod_base = OTHER; note = Phosphorothioate bond
  modified_base 2: mod_base = OTHER; note = 2'-O-methyl-adenosine
  modified_base 2^3: mod_base = OTHER; note = Phosphorothioate bond
  modified_base 3: mod_base = cm
  modified_base 4: mod_base = cm
  modified_base 5: mod_base = cm
  modified_base 6: mod_base = OTHER; note = 2'-O-methyl-adenosine
  modified_base 7: mod_base = OTHER; note = 2'-Fluoro-adenosine
  modified_base 8: mod_base = OTHER; note = 2'-O-methyl-adenosine
  modified_base 9: mod_base = OTHER; note = 2'-Fluoro-uridine
  modified_base 10: mod_base = OTHER; note = 2'-Fluoro-cytidine
  modified_base 11: mod_base = OTHER; note = 2'-Fluoro-adenosine
  modified_base 12: mod_base = cm
  modified_base 13: mod_base = OTHER; note = 2'-O-methyl-adenosine
  modified_base 14: mod_base = gm
  modified_base 15: mod_base = um
  modified_base 16: mod_base = gm
  modified_base 17: mod_base = gm
  modified_base 18: mod_base = OTHER; note = 2'-O-methyl-adenosine
  modified_base 19: mod_base = cm
  modified_base 20: mod_base = OTHER; note = 2'-O-methyl-adenosine
  modified_base 21: mod_base = um
tacccaaatcacagtggacat

SEQ ID NO: 540 - RNA, 21 nt, synthetic construct
  source 1..21: mol_type = other RNA
  modified_base 1: mod_base = um
  modified_base 1^2: mod_base = OTHER; note = Phosphorothioate bond
  modified_base 2: mod_base = cm
  modified_base 2^3: mod_base = OTHER; note = Phosphorothioate bond
  modified_base 3: mod_base = cm
  modified_base 4: mod_base = um
  modified_base 5: mod_base = cm
  modified_base 6: mod_base = OTHER; note = 2'-O-methyl-adenosine
  modified_base 7: mod_base = OTHER; note = 2'-Fluoro-guanosine
  modified_base 8: mod_base = OTHER; note = 2'-O-methyl-adenosine
  modified_base 9: mod_base = OTHER; note = 2'-Fluoro-guanosine
  modified_base 10: mod_base = OTHER; note = 2'-Fluoro-guanosine
  modified_base 11: mod_base = OTHER; note = 2'-Fluoro-uridine
  modified_base 12: mod_base = um
  modified_base 13: mod_base = um
  modified_base 14: mod_base = gm
  modified_base 15: mod_base = OTHER; note = 2'-O-methyl-adenosine
  modified_base 16: mod_base = cm
  modified_base 17: mod_base = cm
  modified_base 18: mod_base = gm
  modified_base 19: mod_base = OTHER; note = 2'-O-methyl-adenosine
  modified_base 20: mod_base = OTHER; note = 2'-O-methyl-adenosine
  modified_base 21: mod_base = um
tcctcagaggtttgaccgaat

SEQ ID NO: 541 - RNA, 21 nt, synthetic construct
  source 1..21: mol_type = other RNA
  modified_base 1: mod_base = OTHER; note = 2'-O-methyl-adenosine
  modified_base 1^2: mod_base = OTHER; note = Phosphorothioate bond
  modified_base 2: mod_base = cm
  modified_base 2^3: mod_base = OTHER; note = Phosphorothioate bond
  modified_base 3: mod_base = um
  modified_base 4: mod_base = um
  modified_base 5: mod_base = gm
  modified_base 6: mod_base = OTHER; note = 2'-O-methyl-adenosine
  modified_base 7: mod_base = OTHER; note = 2'-Fluoro-adenosine
  modified_base 8: mod_base = um
  modified_base 9: mod_base = OTHER; note = 2'-Fluoro-uridine
  modified_base 10: mod_base = OTHER; note = 2'-Fluoro-uridine
  modified_base 11: mod_base = OTHER; note = 2'-Fluoro-cytidine
  modified_base 12: mod_base = cm
  modified_base 13: mod_base = um
  modified_base 14: mod_base = OTHER; note = 2'-O-methyl-adenosine
  modified_base 15: mod_base = um
  modified_base 16: mod_base = gm
  modified_base 17: mod_base = um
  modified_base 18: mod_base = OTHER; note = 2'-O-methyl-adenosine
  modified_base 19: mod_base = um
  modified_base 20: mod_base = um
  modified_base 21: mod_base = um
acttgaatttcctatgtattt

SEQ ID NO: 542 - RNA, 21 nt, synthetic construct
  source 1..21: mol_type = other RNA
  modified_base 1: mod_base = OTHER; note = 2'-O-methyl-adenosine
  modified_base 1^2: mod_base = OTHER; note = Phosphorothioate bond
  modified_base 2: mod_base = um
  modified_base 2^3: mod_base = OTHER; note = Phosphorothioate bond
  modified_base 3: mod_base = gm
  modified_base 4: mod_base = OTHER; note = 2'-O-methyl-adenosine
  modified_base 5: mod_base = OTHER; note = 2'-O-methyl-adenosine
  modified_base 6: mod_base = um
  modified_base 7: mod_base = OTHER; note = 2'-Fluoro-guanosine
  modified_base 8: mod_base = um
  modified_base 9: mod_base = OTHER; note = 2'-Fluoro-guanosine
  modified_base 10: mod_base = OTHER; note = 2'-Fluoro-cytidine
  modified_base 11: mod_base = OTHER; note = 2'-Fluoro-cytidine
  modified_base 12: mod_base = um
  modified_base 13: mod_base = um
  modified_base 14: mod_base = um
  modified_base 15: mod_base = um
  modified_base 16: mod_base = OTHER; note = 2'-O-methyl-adenosine
  modified_base 17: mod_base = OTHER; note = 2'-O-methyl-adenosine
  modified_base 18: mod_base = um
  modified_base 19: mod_base = um
  modified_base 20: mod_base = OTHER; note = 2'-O-methyl-adenosine
  modified_base 21: mod_base = gm
atgaatgtgccttttaattag

SEQ ID NO: 543 - RNA, 21 nt, synthetic construct
  source 1..21: mol_type = other RNA
  modified_base 1: mod_base = gm
  modified_base 1^2: mod_base = OTHER; note = Phosphorothioate bond
  modified_base 2: mod_base = cm
  modified_base 2^3: mod_base = OTHER; note = Phosphorothioate bond
  modified_base 3: mod_base = gm
  modified_base 4: mod_base = um
  modified_base 5: mod_base = cm
  modified_base 6: mod_base = um
  modified_base 7: mod_base = OTHER; note = 2'-Fluoro-cytidine
  modified_base 8: mod_base = um
  modified_base 9: mod_base = OTHER; note = 2'-Fluoro-cytidine
  modified_base 10: mod_base = OTHER; note = 2'-Fluoro-cytidine
  modified_base 11: mod_base = OTHER; note = 2'-Fluoro-uridine
  modified_base 12: mod_base = cm
  modified_base 13: mod_base = OTHER; note = 2'-O-methyl-adenosine
  modified_base 14: mod_base = cm
  modified_base 15: mod_base = OTHER; note = 2'-O-methyl-adenosine
  modified_base 16: mod_base = OTHER; note = 2'-O-methyl-adenosine
  modified_base 17: mod_base = gm
  modified_base 18: mod_base = gm
  modified_base 19: mod_base = um
  modified_base 20: mod_base = gm
  modified_base 21: mod_base = gm
gcgtctctcctcacaaggtgg

SEQ ID NO: 544 - RNA, 21 nt, synthetic construct
  source 1..21: mol_type = other RNA
  modified_base 1: mod_base = OTHER; note = 2'-O-methyl-adenosine
  modified_base 1^2: mod_base = OTHER; note = Phosphorothioate bond
  modified_base 2: mod_base = um
  modified_base 2^3: mod_base = OTHER; note = Phosphorothioate bond
  modified_base 3: mod_base = OTHER; note = 2'-O-methyl-adenosine
  modified_base 4: mod_base = cm
  modified_base 5: mod_base = cm
  modified_base 6: mod_base = cm
  modified_base 7: mod_base = OTHER; note = 2'-Fluoro-adenosine
  modified_base 8: mod_base = OTHER; note = 2'-O-methyl-adenosine
  modified_base 9: mod_base = OTHER; note = 2'-Fluoro-adenosine
  modified_base 10: mod_base = OTHER; note = 2'-Fluoro-uridine
  modified_base 11: mod_base = OTHER; note = 2'-Fluoro-cytidine
  modified_base 12: mod_base = OTHER; note = 2'-O-methyl-adenosine
  modified_base 13: mod_base = cm
  modified_base 14: mod_base = OTHER; note = 2'-O-methyl-adenosine
  modified_base 15: mod_base = gm
  modified_base 16: mod_base = um
  modified_base 17: mod_base = gm
  modified_base 18: mod_base = gm
  modified_base 19: mod_base = OTHER; note = 2'-O-methyl-adenosine
  modified_base 20: mod_base = cm
  modified_base 21: mod_base = OTHER; note = 2'-O-methyl-adenosine
atacccaaatcacagtggaca

SEQ ID NO: 545 - RNA, 21 nt, synthetic construct
  source 1..21: mol_type = other RNA
  modified_base 1: mod_base = um
  modified_base 1^2: mod_base = OTHER; note = Phosphorothioate bond
  modified_base 2: mod_base = OTHER; note = 2'-O-methyl-adenosine
  modified_base 2^3: mod_base = OTHER; note = Phosphorothioate bond
  modified_base 3: mod_base = OTHER; note = 2'-O-methyl-adenosine
  modified_base 4: mod_base = OTHER; note = 2'-O-methyl-adenosine
  modified_base 5: mod_base = cm
  modified_base 6: mod_base = um
  modified_base 7: mod_base = OTHER; note = 2'-Fluoro-uridine
  modified_base 8: mod_base = gm
  modified_base 9: mod_base = OTHER; note = 2'-Fluoro-adenosine
  modified_base 10: mod_base = OTHER; note = 2'-Fluoro-adenosine
  modified_base 11: mod_base = OTHER; note = 2'-Fluoro-uridine
  modified_base 12: mod_base = um
  modified_base 13: mod_base = um
  modified_base 14: mod_base = cm
  modified_base 15: mod_base = cm
  modified_base 16: mod_base = um
  modified_base 17: mod_base = OTHER; note = 2'-O-methyl-adenosine
  modified_base 18: mod_base = um
  modified_base 19: mod_base = gm
  modified_base 20: mod_base = um
  modified_base 21: mod_base = OTHER; note = 2'-O-methyl-adenosine
taaacttgaatttcctatgta

SEQ ID NO: 546 - RNA, 21 nt, synthetic construct
  source 1..21: mol_type = other RNA
  modified_base 1: mod_base = gm
  modified_base 1^2: mod_base = OTHER; note = Phosphorothioate bond
  modified_base 2: mod_base = um
  modified_base 2^3: mod_base = OTHER; note = Phosphorothioate bond
  modified_base 3: mod_base = cm
  modified_base 4: mod_base = um
  modified_base 5: mod_base = gm
  modified_base 6: mod_base = OTHER; note = 2'-O-methyl-adenosine
  modified_base 7: mod_base = OTHER; note = 2'-Fluoro-uridine
  modified_base 8: mod_base = um
  modified_base 9: mod_base = OTHER; note = 2'-Fluoro-uridine
  modified_base 10: mod_base = OTHER; note = 2'-Fluoro-cytidine
  modified_base 11: mod_base = OTHER; note = 2'-Fluoro-uridine
  modified_base 12: mod_base = gm
  modified_base 13: mod_base = OTHER; note = 2'-O-methyl-adenosine
  modified_base 14: mod_base = OTHER; note = 2'-O-methyl-adenosine
  modified_base 15: mod_base = um
  modified_base 16: mod_base = gm
  modified_base 17: mod_base = um
  modified_base 18: mod_base = OTHER; note = 2'-O-methyl-adenosine
  modified_base 19: mod_base = OTHER; note = 2'-O-methyl-adenosine
  modified_base 20: mod_base = OTHER; note = 2'-O-methyl-adenosine
  modified_base 21: mod_base = gm
gtctgatttctgaatgtaaag

SEQ ID NO: 547 - RNA, 21 nt, synthetic construct
  source 1..21: mol_type = other RNA
  modified_base 1: mod_base = gm
  modified_base 1^2: mod_base = OTHER; note = Phosphorothioate bond
  modified_base 2: mod_base = gm
  modified_base 2^3: mod_base = OTHER; note = Phosphorothioate bond
  modified_base 3: mod_base = OTHER; note = 2'-O-methyl-adenosine
  modified_base 4: mod_base = um
  modified_base 5: mod_base = um
  modified_base 6: mod_base = um
  modified_base 7: mod_base = OTHER; note = 2'-Fluoro-cytidine
  modified_base 8: mod_base = cm
  modified_base 9: mod_base = OTHER; note = 2'-Fluoro-uridine
  modified_base 10: mod_base = OTHER; note = 2'-Fluoro-adenosine
  modified_base 11: mod_base = OTHER; note = 2'-Fluoro-adenosine
  modified_base 12: mod_base = um
  modified_base 13: mod_base = OTHER; note = 2'-O-methyl-adenosine
  modified_base 14: mod_base = OTHER; note = 2'-O-methyl-adenosine
  modified_base 15: mod_base = um
  modified_base 16: mod_base = um
  modified_base 17: mod_base = OTHER; note = 2'-O-methyl-adenosine
  modified_base 18: mod_base = um
  modified_base 19: mod_base = um
  modified_base 20: mod_base = gm
  modified_base 21: mod_base = gm
ggatttcctaataattattgg

SEQ ID NO: 548 - RNA, 21 nt, synthetic construct
  source 1..21: mol_type = other RNA
  modified_base 1: mod_base = OTHER; note = 2'-O-methyl-adenosine
  modified_base 1^2: mod_base = OTHER; note = Phosphorothioate bond
  modified_base 2: mod_base = um
  modified_base 2^3: mod_base = OTHER; note = Phosphorothioate bond
  modified_base 3: mod_base = um
  modified_base 4: mod_base = cm
  modified_base 5: mod_base = cm
  modified_base 6: mod_base = gm
  modified_base 7: mod_base = OTHER; note = 2'-Fluoro-cytidine
  modified_base 8: mod_base = OTHER; note = 2'-O-methyl-adenosine
  modified_base 9: mod_base = OTHER; note = 2'-Fluoro-adenosine
  modified_base 10: mod_base = OTHER; note = 2'-Fluoro-cytidine
  modified_base 11: mod_base = OTHER; note = 2'-Fluoro-cytidine
  modified_base 12: mod_base = gm
  modified_base 13: mod_base = gm
  modified_base 14: mod_base = cm
  modified_base 15: mod_base = OTHER; note = 2'-O-methyl-adenosine
  modified_base 16: mod_base = gm
  modified_base 17: mod_base = gm
  modified_base 18: mod_base = OTHER; note = 2'-O-methyl-adenosine
  modified_base 19: mod_base = gm
  modified_base 20: mod_base = cm
  modified_base 21: mod_base = OTHER; note = 2'-O-methyl-adenosine
attccgcaaccggcaggagca

SEQ ID NO: 549 - RNA, 21 nt, synthetic construct
  source 1..21: mol_type = other RNA
  modified_base 1: mod_base = gm
  modified_base 1^2: mod_base = OTHER; note = Phosphorothioate bond
  modified_base 2: mod_base = um
  modified_base 2^3: mod_base = OTHER; note = Phosphorothioate bond
  modified_base 3: mod_base = cm
  modified_base 4: mod_base = um
  modified_base 5: mod_base = cm
  modified_base 6: mod_base = um
  modified_base 7: mod_base = OTHER; note = 2'-Fluoro-guanosine
  modified_base 8: mod_base = cm
  modified_base 9: mod_base = OTHER; note = 2'-Fluoro-uridine
  modified_base 10: mod_base = OTHER; note = 2'-Fluoro-cytidine
  modified_base 11: mod_base = OTHER; note = 2'-Fluoro-uridine
  modified_base 12: mod_base = OTHER; note = 2'-O-methyl-adenosine
  modified_base 13: mod_base = OTHER; note = 2'-O-methyl-adenosine
  modified_base 14: mod_base = gm
  modified_base 15: mod_base = um
  modified_base 16: mod_base = OTHER; note = 2'-O-methyl-adenosine
  modified_base 17: mod_base = OTHER; note = 2'-O-methyl-adenosine
  modified_base 18: mod_base = OTHER; note = 2'-O-methyl-adenosine
  modified_base 19: mod_base = cm
  modified_base 20: mod_base = OTHER; note = 2'-O-methyl-adenosine
  modified_base 21: mod_base = OTHER; note = 2'-O-methyl-adenosine
gtctctgctctaagtaaacaa

SEQ ID NO: 550 - RNA, 21 nt, synthetic construct
  source 1..21: mol_type = other RNA
  modified_base 1: mod_base = cm
  modified_base 1^2: mod_base = OTHER; note = Phosphorothioate bond
  modified_base 2: mod_base = um
  modified_base 2^3: mod_base = OTHER; note = Phosphorothioate bond
  modified_base 3: mod_base = gm
  modified_base 4: mod_base = cm
  modified_base 5: mod_base = um
  modified_base 6: mod_base = cm
  modified_base 7: mod_base = OTHER; note = 2'-Fluoro-uridine
  modified_base 8: mod_base = OTHER; note = 2'-O-methyl-adenosine
  modified_base 9: mod_base = OTHER; note = 2'-Fluoro-adenosine
  modified_base 10: mod_base = OTHER; note = 2'-Fluoro-guanosine
  modified_base 11: mod_base = OTHER; note = 2'-Fluoro-uridine
  modified_base 12: mod_base = OTHER; note = 2'-O-methyl-adenosine
  modified_base 13: mod_base = OTHER; note = 2'-O-methyl-adenosine
  modified_base 14: mod_base = OTHER; note = 2'-O-methyl-adenosine
  modified_base 15: mod_base = cm
  modified_base 16: mod_base = OTHER; note = 2'-O-methyl-adenosine
  modified_base 17: mod_base = OTHER; note = 2'-O-methyl-adenosine
  modified_base 18: mod_base = cm
  modified_base 19: mod_base = OTHER; note = 2'-O-methyl-adenosine
  modified_base 20: mod_base = gm
  modified_base 21: mod_base = um
ctgctctaagtaaacaacagt

SEQ ID NO: 551 - RNA, 21 nt, synthetic construct
  source 1..21: mol_type = other RNA
  modified_base 1: mod_base = um
  modified_base 1^2: mod_base = OTHER; note = Phosphorothioate bond
  modified_base 2: mod_base = um
  modified_base 2^3: mod_base = OTHER; note = Phosphorothioate bond
  modified_base 3: mod_base = um
  modified_base 4: mod_base = um
  modified_base 5: mod_base = cm
  modified_base 6: mod_base = cm
  modified_base 7: mod_base = OTHER; note = 2'-Fluoro-adenosine
  modified_base 8: mod_base = OTHER; note = 2'-O-methyl-adenosine
  modified_base 9: mod_base = OTHER; note = 2'-Fluoro-adenosine
  modified_base 10: mod_base = OTHER; note = 2'-Fluoro-guanosine
  modified_base 11: mod_base = OTHER; note = 2'-Fluoro-uridine
  modified_base 12: mod_base = gm
  modified_base 13: mod_base = cm
  modified_base 14: mod_base = cm
  modified_base 15: mod_base = um
  modified_base 16: mod_base = um
  modified_base 17: mod_base = OTHER; note = 2'-O-methyl-adenosine
  modified_base 18: mod_base = OTHER; note = 2'-O-methyl-adenosine
  modified_base 19: mod_base = OTHER; note = 2'-O-methyl-adenosine
  modified_base 20: mod_base = OTHER; note = 2'-O-methyl-adenosine
  modified_base 21: mod_base = gm
ttttccaaagtgccttaaaag

SEQ ID NO: 552 - RNA, 21 nt, synthetic construct
  source 1..21: mol_type = other RNA
  modified_base 1: mod_base = um
  modified_base 1^2: mod_base = OTHER; note = Phosphorothioate bond
  modified_base 2: mod_base = OTHER; note = 2'-O-methyl-adenosine
  modified_base 2^3: mod_base = OTHER; note = Phosphorothioate bond
  modified_base 3: mod_base = um
  modified_base 4: mod_base = gm
  modified_base 5: mod_base = um
  modified_base 6: mod_base = um
  modified_base 7: mod_base = OTHER; note = 2'-Fluoro-cytidine
  modified_base 8: mod_base = OTHER; note = 2'-O-methyl-adenosine
  modified_base 9: mod_base = OTHER; note = 2'-Fluoro-guanosine
  modified_base 10: mod_base = OTHER; note = 2'-Fluoro-uridine
  modified_base 11: mod_base = OTHER; note = 2'-Fluoro-adenosine
  modified_base 12: mod_base = um
  modified_base 13: mod_base = um
  modified_base 14: mod_base = um
  modified_base 15: mod_base = um
  modified_base 16: mod_base = gm
  modified_base 17: mod_base = gm
  modified_base 18: mod_base = OTHER; note = 2'-O-methyl-adenosine
  modified_base 19: mod_base = gm
  modified_base 20: mod_base = gm
  modified_base 21: mod_base = um
tatgttcagtattttggaggt

SEQ ID NO: 553 - RNA, 21 nt, synthetic construct
  source 1..21: mol_type = other RNA
  modified_base 1: mod_base = OTHER; note = 2'-O-methyl-adenosine
  modified_base 1^2: mod_base = OTHER; note = Phosphorothioate bond
  modified_base 2: mod_base = cm
  modified_base 2^3: mod_base = OTHER; note = Phosphorothioate bond
  modified_base 3: mod_base = OTHER; note = 2'-O-methyl-adenosine
  modified_base 4: mod_base = gm
  modified_base 5: mod_base = um
  modified_base 6: mod_base = gm
  modified_base 7: mod_base = OTHER; note = 2'-Fluoro-guanosine
  modified_base 8: mod_base = OTHER; note = 2'-O-methyl-adenosine
  modified_base 9: mod_base = OTHER; note = 2'-Fluoro-cytidine
  modified_base 10: mod_base = OTHER; note = 2'-Fluoro-adenosine
  modified_base 11: mod_base = OTHER; note = 2'-Fluoro-uridine
  modified_base 12: mod_base = cm
  modified_base 13: mod_base = gm
  modified_base 14: mod_base = gm
  modified_base 15: mod_base = gm
  modified_base 16: mod_base = OTHER; note = 2'-O-methyl-adenosine
  modified_base 17: mod_base = cm
  modified_base 18: mod_base = OTHER; note = 2'-O-methyl-adenosine
  modified_base 19: mod_base = cm
  modified_base 20: mod_base = cm
  modified_base 21: mod_base = gm
acagtggacatcgggacaccg

SEQ ID NO: 554 - RNA, 21 nt, synthetic construct
  source 1..21: mol_type = other RNA
  modified_base 1: mod_base = OTHER; note = 2'-O-methyl-adenosine
  modified_base 1^2: mod_base = OTHER; note = Phosphorothioate bond
  modified_base 2: mod_base = um
  modified_base 2^3: mod_base = OTHER; note = Phosphorothioate bond
  modified_base 3: mod_base = um
  modified_base 4: mod_base = um
  modified_base 5: mod_base = cm
  modified_base 6: mod_base = cm
  modified_base 7: mod_base = OTHER; note = 2'-Fluoro-uridine
  modified_base 8: mod_base = OTHER; note = 2'-O-methyl-adenosine
  modified_base 9: mod_base = OTHER; note = 2'-Fluoro-adenosine
  modified_base 10: mod_base = OTHER; note = 2'-Fluoro-uridine
  modified_base 11: mod_base = OTHER; note = 2'-Fluoro-adenosine
  modified_base 12: mod_base = OTHER; note = 2'-O-methyl-adenosine
  modified_base 13: mod_base = um
  modified_base 14: mod_base = um
  modified_base 15: mod_base = OTHER; note = 2'-O-methyl-adenosine
  modified_base 16: mod_base = um
  modified_base 17: mod_base = um
  modified_base 18: mod_base = gm
  modified_base 19: mod_base = gm
  modified_base 20: mod_base = gm
  modified_base 21: mod_base = gm
atttcctaataattattgggg

SEQ ID NO: 555 - RNA, 21 nt, synthetic construct
  source 1..21: mol_type = other RNA
  modified_base 1: mod_base = OTHER; note = 2'-O-methyl-adenosine
  modified_base 1^2: mod_base = OTHER; note = Phosphorothioate bond
  modified_base 2: mod_base = cm
  modified_base 2^3: mod_base = OTHER; note = Phosphorothioate bond
  modified_base 3: mod_base = cm
  modified_base 4: mod_base = cm
  modified_base 5: mod_base = OTHER; note = 2'-O-methyl-adenosine
  modified_base 6: mod_base = OTHER; note = 2'-O-methyl-adenosine
  modified_base 7: mod_base = OTHER; note = 2'-Fluoro-adenosine
  modified_base 8: mod_base = um
  modified_base 9: mod_base = OTHER; note = 2'-Fluoro-cytidine
  modified_base 10: mod_base = OTHER; note = 2'-Fluoro-adenosine
  modified_base 11: mod_base = OTHER; note = 2'-Fluoro-cytidine
  modified_base 12: mod_base = OTHER; note = 2'-O-methyl-adenosine
  modified_base 13: mod_base = gm
  modified_base 14: mod_base = um
  modified_base 15: mod_base = gm
  modified_base 16: mod_base = gm
  modified_base 17: mod_base = OTHER; note = 2'-O-methyl-adenosine
  modified_base 18: mod_base = cm
  modified_base 19: mod_base = OTHER; note = 2'-O-methyl-adenosine
  modified_base 20: mod_base = um
  modified_base 21: mod_base = cm
acccaaatcacagtggacatc

SEQ ID NO: 556 - RNA, 21 nt, synthetic construct
  source 1..21: mol_type = other RNA
  modified_base 1: mod_base = um
  modified_base 1^2: mod_base = OTHER; note = Phosphorothioate bond
  modified_base 2: mod_base = um
  modified_base 2^3: mod_base = OTHER; note = Phosphorothioate bond
  modified_base 3: mod_base = um
  modified_base 4: mod_base = gm
  modified_base 5: mod_base = gm
  modified_base 6: mod_base = OTHER; note = 2'-O-methyl-adenosine
  modified_base 7: mod_base = OTHER; note = 2'-Fluoro-guanosine
  modified_base 8: mod_base = gm
  modified_base 9: mod_base = OTHER; note = 2'-Fluoro-uridine
  modified_base 10: mod_base = OTHER; note = 2'-Fluoro-guanosine
  modified_base 11: mod_base = OTHER; note = 2'-Fluoro-uridine
  modified_base 12: mod_base = cm
  modified_base 13: mod_base = um
  modified_base 14: mod_base = cm
  modified_base 15: mod_base = um
  modified_base 16: mod_base = gm
  modified_base 17: mod_base = cm
  modified_base 18: mod_base = um
  modified_base 19: mod_base = cm
  modified_base 20: mod_base = um
  modified_base 21: mod_base = OTHER; note = 2'-O-methyl-adenosine
tttggaggtgtctctgctcta

SEQ ID NO: 557 - RNA, 21 nt, synthetic construct
  source 1..21: mol_type = other RNA
  modified_base 1: mod_base = cm
  modified_base 1^2: mod_base = OTHER; note = Phosphorothioate bond
  modified_base 2: mod_base = cm
  modified_base 2^3: mod_base = OTHER; note = Phosphorothioate bond
  modified_base 3: mod_base = OTHER; note = 2'-O-methyl-adenosine
  modified_base 4: mod_base = OTHER; note = 2'-O-methyl-adenosine
  modified_base 5: mod_base = OTHER; note = 2'-O-methyl-adenosine
  modified_base 6: mod_base = um
  modified_base 7: mod_base = OTHER; note = 2'-Fluoro-cytidine
  modified_base 8: mod_base = OTHER; note = 2'-O-methyl-adenosine
  modified_base 9: mod_base = OTHER; note = 2'-Fluoro-cytidine
  modified_base 10: mod_base = OTHER; note = 2'-Fluoro-adenosine
  modified_base 11: mod_base = OTHER; note = 2'-Fluoro-guanosine
  modified_base 12: mod_base = um
  modified_base 13: mod_base = gm
  modified_base 14: mod_base = gm
  modified_base 15: mod_base = OTHER; note = 2'-O-methyl-adenosine
  modified_base 16: mod_base = cm
  modified_base 17: mod_base = OTHER; note = 2'-O-methyl-adenosine
  modified_base 18: mod_base = um
  modified_base 19: mod_base = cm
  modified_base 20: mod_base = gm
  modified_base 21: mod_base = gm
ccaaatcacagtggacatcgg

SEQ ID NO: 558 - RNA, 21 nt, synthetic construct
  source 1..21: mol_type = other RNA
  modified_base 1: mod_base = um
  modified_base 1^2: mod_base = OTHER; note = Phosphorothioate bond
  modified_base 2: mod_base = um
  modified_base 2^3: mod_base = OTHER; note = Phosphorothioate bond
  modified_base 3: mod_base = um
  modified_base 4: mod_base = cm
  modified_base 5: mod_base = cm
  modified_base 6: mod_base = OTHER; note = 2'-O-methyl-adenosine
  modified_base 7: mod_base = OTHER; note = 2'-Fluoro-adenosine
  modified_base 8: mod_base = OTHER; note = 2'-O-methyl-adenosine
  modified_base 9: mod_base = OTHER; note = 2'-Fluoro-guanosine
  modified_base 10: mod_base = OTHER; note = 2'-Fluoro-uridine
  modified_base 11: mod_base = OTHER; note = 2'-Fluoro-guanosine
  modified_base 12: mod_base = cm
  modified_base 13: mod_base = cm
  modified_base 14: mod_base = um
  modified_base 15: mod_base = um
  modified_base 16: mod_base = OTHER; note = 2'-O-methyl-adenosine
  modified_base 17: mod_base = OTHER; note = 2'-O-methyl-adenosine
  modified_base 18: mod_base = OTHER; note = 2'-O-methyl-adenosine
  modified_base 19: mod_base = OTHER; note = 2'-O-methyl-adenosine
  modified_base 20: mod_base = gm
  modified_base 21: mod_base = OTHER; note = 2'-O-methyl-adenosine
tttccaaagtgccttaaaaga

SEQ ID NO: 559 - RNA, 21 nt, synthetic construct
  source 1..21: mol_type = other RNA
  modified_base 1: mod_base = gm
  modified_base 1^2: mod_base = OTHER; note = Phosphorothioate bond
  modified_base 2: mod_base = OTHER; note = 2'-O-methyl-adenosine
  modified_base 2^3: mod_base = OTHER; note = Phosphorothioate bond
  modified_base 3: mod_base = um
  modified_base 4: mod_base = um
  modified_base 5: mod_base = um
  modified_base 6: mod_base = cm
  modified_base 7: mod_base = OTHER; note = 2'-Fluoro-cytidine
  modified_base 8: mod_base = um
  modified_base 9: mod_base = OTHER; note = 2'-Fluoro-adenosine
  modified_base 10: mod_base = OTHER; note = 2'-Fluoro-adenosine
  modified_base 11: mod_base = OTHER; note = 2'-Fluoro-uridine
  modified_base 12: mod_base = OTHER; note = 2'-O-methyl-adenosine
  modified_base 13: mod_base = OTHER; note = 2'-O-methyl-adenosine
  modified_base 14: mod_base = um
  modified_base 15: mod_base = um
  modified_base 16: mod_base = OTHER; note = 2'-O-methyl-adenosine
  modified_base 17: mod_base = um
  modified_base 18: mod_base = um
  modified_base 19: mod_base = gm
  modified_base 20: mod_base = gm
  modified_base 21: mod_base = gm
gatttcctaataattattggg

SEQ ID NO: 560 - RNA, 21 nt, synthetic construct
  source 1..21: mol_type = other RNA
  modified_base 1: mod_base = um
  modified_base 1^2: mod_base = OTHER; note = Phosphorothioate bond
  modified_base 2: mod_base = OTHER; note = 2'-O-methyl-adenosine
  modified_base 2^3: mod_base = OTHER; note = Phosphorothioate bond
  modified_base 3: mod_base = um
  modified_base 4: mod_base = OTHER; note = 2'-O-methyl-adenosine
  modified_base 5: mod_base = cm
  modified_base 6: mod_base = cm
  modified_base 7: mod_base = OTHER; note = 2'-Fluoro-cytidine
  modified_base 8: mod_base = OTHER; note = 2'-O-methyl-adenosine
  modified_base 9: mod_base = OTHER; note = 2'-Fluoro-adenosine
  modified_base 10: mod_base = OTHER; note = 2'-Fluoro-adenosine
  modified_base 11: mod_base = OTHER; note = 2'-Fluoro-uridine
  modified_base 12: mod_base = cm
  modified_base 13: mod_base = OTHER; note = 2'-O-methyl-adenosine
  modified_base 14: mod_base = cm
  modified_base 15: mod_base = OTHER; note = 2'-O-methyl-adenosine
  modified_base 16: mod_base = gm
  modified_base 17: mod_base = um
  modified_base 18: mod_base = gm
  modified_base 19: mod_base = gm
  modified_base 20: mod_base = OTHER; note = 2'-O-methyl-adenosine
  modified_base 21: mod_base = cm
tatacccaaatcacagtggac

SEQ ID NO: 561 - RNA, 21 nt, synthetic construct
  source 1..21: mol_type = other RNA
  modified_base 1: mod_base = gm
  modified_base 1^2: mod_base = OTHER; note = Phosphorothioate bond
  modified_base 2: mod_base = gm
  modified_base 2^3: mod_base = OTHER; note = Phosphorothioate bond
  modified_base 3: mod_base = um
  modified_base 4: mod_base = um
  modified_base 5: mod_base = um
  modified_base 6: mod_base = gm
  modified_base 7: mod_base = OTHER; note = 2'-Fluoro-adenosine
  modified_base 8: mod_base = OTHER; note = 2'-O-methyl-adenosine
  modified_base 9: mod_base = OTHER; note = 2'-Fluoro-cytidine
  modified_base 10: mod_base = OTHER; note = 2'-Fluoro-uridine
  modified_base 11: mod_base = OTHER; note = 2'-Fluoro-cytidine
  modified_base 12: mod_base = OTHER; note = 2'-O-methyl-adenosine
  modified_base 13: mod_base = cm
  modified_base 14: mod_base = um
  modified_base 15: mod_base = cm
  modified_base 16: mod_base = OTHER; note = 2'-O-methyl-adenosine
  modified_base 17: mod_base = cm
  modified_base 18: mod_base = cm
  modified_base 19: mod_base = um
  modified_base 20: mod_base = OTHER; note = 2'-O-methyl-adenosine
  modified_base 21: mod_base = cm
ggtttgaactcactcacctac

SEQ ID NO: 562 - RNA, 21 nt, synthetic construct
  source 1..21: mol_type = other RNA
  modified_base 1: mod_base = gm
  modified_base 1^2: mod_base = OTHER; note = Phosphorothioate bond
  modified_base 2: mod_base = gm
  modified_base 2^3: mod_base = OTHER; note = Phosphorothioate bond
  modified_base 3: mod_base = OTHER; note = 2'-O-methyl-adenosine
  modified_base 4: mod_base = gm
  modified_base 5: mod_base = gm
  modified_base 6: mod_base = um
  modified_base 7: mod_base = OTHER; note = 2'-Fluoro-guanosine
  modified_base 8: mod_base = um
  modified_base 9: mod_base = OTHER; note = 2'-Fluoro-cytidine
  modified_base 10: mod_base = OTHER; note = 2'-Fluoro-uridine
  modified_base 11: mod_base = OTHER; note = 2'-Fluoro-cytidine
  modified_base 12: mod_base = um
  modified_base 13: mod_base = gm
  modified_base 14: mod_base = cm
  modified_base 15: mod_base = um
  modified_base 16: mod_base = cm
  modified_base 17: mod_base = um
  modified_base 18: mod_base = OTHER; note = 2'-O-methyl-adenosine
  modified_base 19: mod_base = OTHER; note = 2'-O-methyl-adenosine
  modified_base 20: mod_base = gm
  modified_base 21: mod_base = um
ggaggtgtctctgctctaagt

SEQ ID NO: 563 - RNA, 21 nt, synthetic construct
  source 1..21: mol_type = other RNA
  modified_base 1: mod_base = um
  modified_base 1^2: mod_base = OTHER; note = Phosphorothioate bond
  modified_base 2: mod_base = gm
  modified_base 2^3: mod_base = OTHER; note = Phosphorothioate bond
  modified_base 3: mod_base = cm
  modified_base 4: mod_base = gm
  modified_base 5: mod_base = um
  modified_base 6: mod_base = cm
  modified_base 7: mod_base = OTHER; note = 2'-Fluoro-uridine
  modified_base 8: mod_base = cm
  modified_base 9: mod_base = OTHER; note = 2'-Fluoro-uridine
  modified_base 10: mod_base = OTHER; note = 2'-Fluoro-cytidine
  modified_base 11: mod_base = OTHER; note = 2'-Fluoro-cytidine
  modified_base 12: mod_base = um
  modified_base 13: mod_base = cm
  modified_base 14: mod_base = OTHER; note = 2'-O-methyl-adenosine
  modified_base 15: mod_base = cm
  modified_base 16: mod_base = OTHER; note = 2'-O-methyl-adenosine
  modified_base 17: mod_base = OTHER; note = 2'-O-methyl-adenosine
  modified_base 18: mod_base = gm
  modified_base 19: mod_base = gm
  modified_base 20: mod_base = um
  modified_base 21: mod_base = gm
tgcgtctctcctcacaaggtg

SEQ ID NO: 564 - RNA, 21 nt, synthetic construct
  source 1..21: mol_type = other RNA
  modified_base 1: mod_base = OTHER; note = 2'-O-methyl-adenosine
  modified_base 1^2: mod_base = OTHER; note = Phosphorothioate bond
  modified_base 2: mod_base = gm
  modified_base 2^3: mod_base = OTHER; note = Phosphorothioate bond
  modified_base 3: mod_base = gm
  modified_base 4: mod_base = OTHER; note = 2'-O-methyl-adenosine
  modified_base 5: mod_base = gm
  modified_base 6: mod_base = OTHER; note = 2'-O-methyl-adenosine
  modified_base 7: mod_base = OTHER; note = 2'-Fluoro-adenosine
  modified_base 8: mod_base = gm
  modified_base 9: mod_base = OTHER; note = 2'-Fluoro-adenosine
  modified_base 10: mod_base = OTHER; note = 2'-Fluoro-uridine
  modified_base 11: mod_base = OTHER; note = 2'-Fluoro-guanosine
  modified_base 12: mod_base = OTHER; note = 2'-O-methyl-adenosine
  modified_base 13: mod_base = um
  modified_base 14: mod_base = gm
  modified_base 15: mod_base = OTHER; note = 2'-O-methyl-adenosine
  modified_base 16: mod_base = cm
  modified_base 17: mod_base = OTHER; note = 2'-O-methyl-adenosine
  modified_base 18: mod_base = um
  modified_base 19: mod_base = um
  modified_base 20: mod_base = um
  modified_base 21: mod_base = um
aggagaagatgatgacatttt

SEQ ID NO: 565 - RNA, 21 nt, synthetic construct
  source 1..21: mol_type = other RNA
  modified_base 1: mod_base = um
  modified_base 1^2: mod_base = OTHER; note = Phosphorothioate bond
  modified_base 2: mod_base = gm
  modified_base 2^3: mod_base = OTHER; note = Phosphorothioate bond
  modified_base 3: mod_base = gm
  modified_base 4: mod_base = OTHER; note = 2'-O-methyl-adenosine
  modified_base 5: mod_base = gm
  modified_base 6: mod_base = gm
  modified_base 7: mod_base = OTHER; note = 2'-Fluoro-uridine
  modified_base 8: mod_base = gm
  modified_base 9: mod_base = OTHER; note = 2'-Fluoro-uridine
  modified_base 10: mod_base = OTHER; note = 2'-Fluoro-cytidine
  modified_base 11: mod_base = OTHER; note = 2'-Fluoro-uridine
  modified_base 12: mod_base = cm
  modified_base 13: mod_base = um
  modified_base 14: mod_base = gm
  modified_base 15: mod_base = cm
  modified_base 16: mod_base = um
  modified_base 17: mod_base = cm
  modified_base 18: mod_base = um
  modified_base 19: mod_base = OTHER; note = 2'-O-methyl-adenosine
  modified_base 20: mod_base = OTHER; note = 2'-O-methyl-adenosine
  modified_base 21: mod_base = gm
tggaggtgtctctgctctaag

SEQ ID NO: 566 - RNA, 21 nt, synthetic construct
  source 1..21: mol_type = other RNA
  modified_base 1: mod_base = um
  modified_base 1^2: mod_base = OTHER; note = Phosphorothioate bond
  modified_base 2: mod_base = um
  modified_base 2^3: mod_base = OTHER; note = Phosphorothioate bond
  modified_base 3: mod_base = OTHER; note = 2'-O-methyl-adenosine
  modified_base 4: mod_base = um
  modified_base 5: mod_base = um
  modified_base 6: mod_base = gm
  modified_base 7: mod_base = OTHER; note = 2'-Fluoro-guanosine
  modified_base 8: mod_base = gm
  modified_base 9: mod_base = OTHER; note = 2'-Fluoro-guanosine
  modified_base 10: mod_base = OTHER; note = 2'-Fluoro-cytidine
  modified_base 11: mod_base = OTHER; note = 2'-Fluoro-uridine
  modified_base 12: mod_base = gm
  modified_base 13: mod_base = gm
  modified_base 14: mod_base = gm
  modified_base 15: mod_base = gm
  modified_base 16: mod_base = OTHER; note = 2'-O-methyl-adenosine
  modified_base 17: mod_base = gm
  modified_base 18: mod_base = gm
  modified_base 19: mod_base = OTHER; note = 2'-O-methyl-adenosine
  modified_base 20: mod_base = gm
  modified_base 21: mod_base = OTHER; note = 2'-O-methyl-adenosine
ttattggggctggggaggaga

SEQ ID NO: 567 - RNA, 21 nt, synthetic construct
  source 1..21: mol_type = other RNA
  modified_base 1: mod_base = cm
  modified_base 1^2: mod_base = OTHER; note = Phosphorothioate bond
  modified_base 2: mod_base = cm
  modified_base 2^3: mod_base = OTHER; note = Phosphorothioate bond
  modified_base 3: mod_base = um
  modified_base 4: mod_base = gm
  modified_base 5: mod_base = OTHER; note = 2'-O-methyl-adenosine
  modified_base 6: mod_base = cm
  modified_base 7: mod_base = OTHER; note = 2'-Fluoro-uridine
  modified_base 8: mod_base = um
  modified_base 9: mod_base = OTHER; note = 2'-Fluoro-uridine
  modified_base 10: mod_base = OTHER; note = 2'-Fluoro-uridine
  modified_base 11: mod_base = OTHER; note = 2'-Fluoro-cytidine
  modified_base 12: mod_base = cm
  modified_base 13: mod_base = OTHER; note = 2'-O-methyl-adenosine
  modified_base 14: mod_base = OTHER; note = 2'-O-methyl-adenosine
  modified_base 15: mod_base = OTHER; note = 2'-O-methyl-adenosine
  modified_base 16: mod_base = gm
  modified_base 17: mod_base = um
  modified_base 18: mod_base = gm
  modified_base 19: mod_base = cm
  modified_base 20: mod_base = cm
  modified_base 21: mod_base = um
cctgacttttccaaagtgcct

SEQ ID NO: 568 - RNA, 21 nt, synthetic construct
  source 1..21: mol_type = other RNA
  modified_base 1: mod_base = gm
  modified_base 1^2: mod_base = OTHER; note = Phosphorothioate bond
  modified_base 2: mod_base = gm
  modified_base 2^3: mod_base = OTHER; note = Phosphorothioate bond
  modified_base 3: mod_base = cm
  modified_base 4: mod_base = OTHER; note = 2'-O-methyl-adenosine
  modified_base 5: mod_base = cm
  modified_base 6: mod_base = OTHER; note = 2'-O-methyl-adenosine
  modified_base 7: mod_base = OTHER; note = 2'-Fluoro-uridine
  modified_base 8: mod_base = um
  modified_base 9: mod_base = OTHER; note = 2'-Fluoro-uridine
  modified_base 10: mod_base = OTHER; note = 2'-Fluoro-cytidine
  modified_base 11: mod_base = OTHER; note = 2'-Fluoro-cytidine
  modified_base 12: mod_base = gm
  modified_base 13: mod_base = um
  modified_base 14: mod_base = um
  modified_base 15: mod_base = gm
  modified_base 16: mod_base = cm
  modified_base 17: mod_base = OTHER; note = 2'-O-methyl-adenosine
  modified_base 18: mod_base = OTHER; note = 2'-O-methyl-adenosine
  modified_base 19: mod_base = um
  modified_base 20: mod_base = gm
  modified_base 21: mod_base = gm
ggcacatttccgttgcaatgg

SEQ ID NO: 569 - RNA, 21 nt, synthetic construct
  source 1..21: mol_type = other RNA
  modified_base 1: mod_base = um
  modified_base 1^2: mod_base = OTHER; note = Phosphorothioate bond
  modified_base 2: mod_base = gm
  modified_base 2^3: mod_base = OTHER; note = Phosphorothioate bond
  modified_base 3: mod_base = cm
  modified_base 4: mod_base = um
  modified_base 5: mod_base = cm
  modified_base 6: mod_base = um
  modified_base 7: mod_base = OTHER; note = 2'-Fluoro-adenosine
  modified_base 8: mod_base = OTHER; note = 2'-O-methyl-adenosine
  modified_base 9: mod_base = OTHER; note = 2'-Fluoro-guanosine
  modified_base 10: mod_base = OTHER; note = 2'-Fluoro-uridine
  modified_base 11: mod_base = OTHER; note = 2'-Fluoro-adenosine
  modified_base 12: mod_base = OTHER; note = 2'-O-methyl-adenosine
  modified_base 13: mod_base = OTHER; note = 2'-O-methyl-adenosine
  modified_base 14: mod_base = cm
  modified_base 15: mod_base = OTHER; note = 2'-O-methyl-adenosine
  modified_base 16: mod_base = OTHER; note = 2'-O-methyl-adenosine
  modified_base 17: mod_base = cm
  modified_base 18: mod_base = OTHER; note = 2'-O-methyl-adenosine
  modified_base 19: mod_base = gm
  modified_base 20: mod_base = um
  modified_base 21: mod_base = um
tgctctaagtaaacaacagtt

SEQ ID NO: 570 - RNA, 21 nt, synthetic construct
  source 1..21: mol_type = other RNA
  modified_base 1: mod_base = um
  modified_base 1^2: mod_base = OTHER; note = Phosphorothioate bond
  modified_base 2: mod_base = um
  modified_base 2^3: mod_base = OTHER; note = Phosphorothioate bond
  modified_base 3: mod_base = gm
  modified_base 4: mod_base = gm
  modified_base 5: mod_base = OTHER; note = 2'-O-methyl-adenosine
  modified_base 6: mod_base = gm
  modified_base 7: mod_base = OTHER; note = 2'-Fluoro-guanosine
  modified_base 8: mod_base = um
  modified_base 9: mod_base = OTHER; note = 2'-Fluoro-guanosine
  modified_base 10: mod_base = OTHER; note = 2'-Fluoro-uridine
  modified_base 11: mod_base = OTHER; note = 2'-Fluoro-cytidine
  modified_base 12: mod_base = um
  modified_base 13: mod_base = cm
  modified_base 14: mod_base = um
  modified_base 15: mod_base = gm
  modified_base 16: mod_base = cm
  modified_base 17: mod_base = um
  modified_base 18: mod_base = cm
  modified_base 19: mod_base = um
  modified_base 20: mod_base = OTHER; note = 2'-O-methyl-adenosine
  modified_base 21: mod_base = OTHER; note = 2'-O-methyl-adenosine
ttggaggtgtctctgctctaa

SEQ ID NO: 571 - RNA, 21 nt, synthetic construct
  source 1..21: mol_type = other RNA
  modified_base 1: mod_base = um
  modified_base 1^2: mod_base = OTHER; note = Phosphorothioate bond
  modified_base 2: mod_base = gm
  modified_base 2^3: mod_base = OTHER; note = Phosphorothioate bond
  modified_base 3: mod_base = cm
  modified_base 4: mod_base = um
  modified_base 5: mod_base = OTHER; note = 2'-O-methyl-adenosine
  modified_base 6: mod_base = um
  modified_base 7: mod_base = OTHER; note = 2'-Fluoro-guanosine
  modified_base 8: mod_base = um
  modified_base 9: mod_base = OTHER; note = 2'-Fluoro-adenosine
  modified_base 10: mod_base = OTHER; note = 2'-Fluoro-adenosine
  modified_base 11: mod_base = OTHER; note = 2'-Fluoro-adenosine
  modified_base 12: mod_base = cm
  modified_base 13: mod_base = um
  modified_base 14: mod_base = um
  modified_base 15: mod_base = gm
  modified_base 16: mod_base = OTHER; note = 2'-O-methyl-adenosine
  modified_base 17: mod_base = OTHER; note = 2'-O-methyl-adenosine
  modified_base 18: mod_base = um
  modified_base 19: mod_base = um
  modified_base 20: mod_base = um
  modified_base 21: mod_base = cm
tgctatgtaaacttgaatttc

SEQ ID NO: 572 - RNA, 21 nt, synthetic construct
  source 1..21: mol_type = other RNA
  modified_base 1: mod_base = um
  modified_base 1^2: mod_base = OTHER; note = Phosphorothioate bond
  modified_base 2: mod_base = gm
  modified_base 2^3: mod_base = OTHER; note = Phosphorothioate bond
  modified_base 3: mod_base = gm
  modified_base 4: mod_base = OTHER; note = 2'-O-methyl-adenosine
  modified_base 5: mod_base = um
  modified_base 6: mod_base = um
  modified_base 7: mod_base = OTHER; note = 2'-Fluoro-uridine
  modified_base 8: mod_base = cm
  modified_base 9: mod_base = OTHER; note = 2'-Fluoro-cytidine
  modified_base 10: mod_base = OTHER; note = 2'-Fluoro-uridine
  modified_base 11: mod_base = OTHER; note = 2'-Fluoro-adenosine
  modified_base 12: mod_base = OTHER; note = 2'-O-methyl-adenosine
  modified_base 13: mod_base = um
  modified_base 14: mod_base = OTHER; note = 2'-O-methyl-adenosine
  modified_base 15: mod_base = OTHER; note = 2'-O-methyl-adenosine
  modified_base 16: mod_base = um
  modified_base 17: mod_base = um
  modified_base 18: mod_base = OTHER; note = 2'-O-methyl-adenosine
  modified_base 19: mod_base = um
  modified_base 20: mod_base = um
  modified_base 21: mod_base = gm
tggatttcctaataattattg

SEQ ID NO: 573 - RNA, 21 nt, synthetic construct
  source 1..21: mol_type = other RNA
  modified_base 1: mod_base = OTHER; note = 2'-O-methyl-adenosine
  modified_base 1^2: mod_base = OTHER; note = Phosphorothioate bond
  modified_base 2: mod_base = um
  modified_base 2^3: mod_base = OTHER; note = Phosphorothioate bond
  modified_base 3: mod_base = um
  modified_base 4: mod_base = OTHER; note = 2'-O-methyl-adenosine
  modified_base 5: mod_base = um
  modified_base 6: mod_base = um
  modified_base 7: mod_base = OTHER; note = 2'-Fluoro-guanosine
  modified_base 8: mod_base = gm
  modified_base 9: mod_base = OTHER; note = 2'-Fluoro-guanosine
  modified_base 10: mod_base = OTHER; note = 2'-Fluoro-guanosine
  modified_base 11: mod_base = OTHER; note = 2'-Fluoro-cytidine
  modified_base 12: mod_base = um
  modified_base 13: mod_base = gm
  modified_base 14: mod_base = gm
  modified_base 15: mod_base = gm
  modified_base 16: mod_base = gm
  modified_base 17: mod_base = OTHER; note = 2'-O-methyl-adenosine
  modified_base 18: mod_base = gm
  modified_base 19: mod_base = gm
  modified_base 20: mod_base = OTHER; note = 2'-O-methyl-adenosine
  modified_base 21: mod_base = gm
attattggggctggggaggag

SEQ ID NO: 574 - RNA, 21 nt, synthetic construct
  source 1..21: mol_type = other RNA
  modified_base 1: mod_base = cm
  modified_base 1^2: mod_base = OTHER; note = Phosphorothioate bond
  modified_base 2: mod_base = um
  modified_base 2^3: mod_base = OTHER; note = Phosphorothioate bond
  modified_base 3: mod_base = um
  modified_base 4: mod_base = um
  modified_base 5: mod_base = um
  modified_base 6: mod_base = cm
  modified_base 7: mod_base = OTHER; note = 2'-Fluoro-cytidine
  modified_base 8: mod_base = OTHER; note = 2'-O-methyl-adenosine
  modified_base 9: mod_base = OTHER; note = 2'-Fluoro-adenosine
  modified_base 10: mod_base = OTHER; note = 2'-Fluoro-adenosine
  modified_base 11: mod_base = OTHER; note = 2'-Fluoro-guanosine
  modified_base 12: mod_base = um
  modified_base 13: mod_base = gm
  modified_base 14: mod_base = cm
  modified_base 15: mod_base = cm
  modified_base 16: mod_base = um
  modified_base 17: mod_base = um
  modified_base 18: mod_base = OTHER; note = 2'-O-methyl-adenosine
  modified_base 19: mod_base = OTHER; note = 2'-O-methyl-adenosine
  modified_base 20: mod_base = OTHER; note = 2'-O-methyl-adenosine
  modified_base 21: mod_base = OTHER; note = 2'-O-methyl-adenosine
cttttccaaagtgccttaaaa

SEQ ID NO: 575 - RNA, 21 nt, synthetic construct
  source 1..21: mol_type = other RNA
  modified_base 1: mod_base = um
  modified_base 1^2: mod_base = OTHER; note = Phosphorothioate bond
  modified_base 2: mod_base = OTHER; note = 2'-O-methyl-adenosine
  modified_base 2^3: mod_base = OTHER; note = Phosphorothioate bond
  modified_base 3: mod_base = um
  modified_base 4: mod_base = um
  modified_base 5: mod_base = gm
  modified_base 6: mod_base = gm
  modified_base 7: mod_base = OTHER; note = 2'-Fluoro-guanosine
  modified_base 8: mod_base = gm
  modified_base 9: mod_base = OTHER; note = 2'-Fluoro-cytidine
  modified_base 10: mod_base = OTHER; note = 2'-Fluoro-uridine
  modified_base 11: mod_base = OTHER; note = 2'-Fluoro-guanosine
  modified_base 12: mod_base = gm
  modified_base 13: mod_base = gm
  modified_base 14: mod_base = gm
  modified_base 15: mod_base = OTHER; note = 2'-O-methyl-adenosine
  modified_base 16: mod_base = gm
  modified_base 17: mod_base = gm
  modified_base 18: mod_base = OTHER; note = 2'-O-methyl-adenosine
  modified_base 19: mod_base = gm
  modified_base 20: mod_base = OTHER; note = 2'-O-methyl-adenosine
  modified_base 21: mod_base = OTHER; note = 2'-O-methyl-adenosine
tattggggctggggaggagaa

SEQ ID NO: 576 - RNA, 21 nt, synthetic construct
  source 1..21: mol_type = other RNA
  modified_base 1: mod_base = gm
  modified_base 1^2: mod_base = OTHER; note = Phosphorothioate bond
  modified_base 2: mod_base = OTHER; note = 2'-O-methyl-adenosine
  modified_base 2^3: mod_base = OTHER; note = Phosphorothioate bond
  modified_base 3: mod_base = cm
  modified_base 4: mod_base = OTHER; note = 2'-O-methyl-adenosine
  modified_base 5: mod_base = um
  modified_base 6: mod_base = cm
  modified_base 7: mod_base = OTHER; note = 2'-Fluoro-guanosine
  modified_base 8: mod_base = gm
  modified_base 9: mod_base = OTHER; note = 2'-Fluoro-guanosine
  modified_base 10: mod_base = OTHER; note = 2'-Fluoro-adenosine
  modified_base 11: mod_base = OTHER; note = 2'-Fluoro-cytidine
  modified_base 12: mod_base = OTHER; note = 2'-O-methyl-adenosine
  modified_base 13: mod_base = cm
  modified_base 14: mod_base = cm
  modified_base 15: mod_base = gm
  modified_base 16: mod_base = OTHER; note = 2'-O-methyl-adenosine
  modified_base 17: mod_base = gm
  modified_base 18: mod_base = cm
  modified_base 19: mod_base = um
  modified_base 20: mod_base = OTHER; note = 2'-O-methyl-adenosine
  modified_base 21: mod_base = gm
gacatcgggacaccgagctag

SEQ ID NO: 577 - RNA, 21 nt, synthetic construct
  source 1..21: mol_type = other RNA
  modified_base 1: mod_base = um
  modified_base 1^2: mod_base = OTHER; note = Phosphorothioate bond
  modified_base 2: mod_base = um
  modified_base 2^3: mod_base = OTHER; note = Phosphorothioate bond
  modified_base 3: mod_base = cm
  modified_base 4: mod_base = OTHER; note = 2'-O-methyl-adenosine
  modified_base 5: mod_base = gm
  modified_base 6: mod_base = um
  modified_base 7: mod_base = OTHER; note = 2'-Fluoro-adenosine
  modified_base 8: mod_base = um
  modified_base 9: mod_base = OTHER; note = 2'-Fluoro-uridine
  modified_base 10: mod_base = OTHER; note = 2'-Fluoro-uridine
  modified_base 11: mod_base = OTHER; note = 2'-Fluoro-uridine
  modified_base 12: mod_base = gm
  modified_base 13: mod_base = gm
  modified_base 14: mod_base = OTHER; note = 2'-O-methyl-adenosine
  modified_base 15: mod_base = gm
  modified_base 16: mod_base = gm
  modified_base 17: mod_base = um
  modified_base 18: mod_base = gm
  modified_base 19: mod_base = um
  modified_base 20: mod_base = cm
  modified_base 21: mod_base = um
ttcagtattttggaggtgtct

SEQ ID NO: 578 - RNA, 21 nt, synthetic construct
  source 1..21: mol_type = other RNA
  modified_base 1: mod_base = gm
  modified_base 1^2: mod_base = OTHER; note = Phosphorothioate bond
  modified_base 2: mod_base = OTHER; note = 2'-O-methyl-adenosine
  modified_base 2^3: mod_base = OTHER; note = Phosphorothioate bond
  modified_base 3: mod_base = gm
  modified_base 4: mod_base = gm
  modified_base 5: mod_base = um
  modified_base 6: mod_base = gm
  modified_base 7: mod_base = OTHER; note = 2'-Fluoro-uridine
  modified_base 8: mod_base = cm
  modified_base 9: mod_base = OTHER; note = 2'-Fluoro-uridine
  modified_base 10: mod_base = OTHER; note = 2'-Fluoro-cytidine
  modified_base 11: mod_base = OTHER; note = 2'-Fluoro-uridine
  modified_base 12: mod_base = gm
  modified_base 13: mod_base = cm
  modified_base 14: mod_base = um
  modified_base 15: mod_base = cm
  modified_base 16: mod_base = um
  modified_base 17: mod_base = OTHER; note = 2'-O-methyl-adenosine
  modified_base 18: mod_base = OTHER; note = 2'-O-methyl-adenosine
  modified_base 19: mod_base = gm
  modified_base 20: mod_base = um
  modified_base 21: mod_base = OTHER; note = 2'-O-methyl-adenosine
gaggtgtctctgctctaagta

SEQ ID NO: 579 - RNA, 21 nt, synthetic construct
  source 1..21: mol_type = other RNA
  modified_base 1: mod_base = um
  modified_base 1^2: mod_base = OTHER; note = Phosphorothioate bond
  modified_base 2: mod_base = gm
  modified_base 2^3: mod_base = OTHER; note = Phosphorothioate bond
  modified_base 3: mod_base = gm
  modified_base 4: mod_base = um
  modified_base 5: mod_base = um
  modified_base 6: mod_base = um
  modified_base 7: mod_base = OTHER; note = 2'-Fluoro-guanosine
  modified_base 8: mod_base = OTHER; note = 2'-O-methyl-adenosine
  modified_base 9: mod_base = OTHER; note = 2'-Fluoro-adenosine
  modified_base 10: mod_base = OTHER; note = 2'-Fluoro-cytidine
  modified_base 11: mod_base = OTHER; note = 2'-Fluoro-uridine
  modified_base 12: mod_base = cm
  modified_base 13: mod_base = OTHER; note = 2'-O-methyl-adenosine
  modified_base 14: mod_base = cm
  modified_base 15: mod_base = um
  modified_base 16: mod_base = cm
  modified_base 17: mod_base = OTHER; note = 2'-O-methyl-adenosine
  modified_base 18: mod_base = cm
  modified_base 19: mod_base = cm
  modified_base 20: mod_base = um
  modified_base 21: mod_base = OTHER; note = 2'-O-methyl-adenosine
tggtttgaactcactcaccta

SEQ ID NO: 580 - RNA, 21 nt, synthetic construct
  source 1..21: mol_type = other RNA
  modified_base 1: mod_base = um
  modified_base 1^2: mod_base = OTHER; note = Phosphorothioate bond
  modified_base 2: mod_base = cm
  modified_base 2^3: mod_base = OTHER; note = Phosphorothioate bond
  modified_base 3: mod_base = um
  modified_base 4: mod_base = gm
  modified_base 5: mod_base = OTHER; note = 2'-O-methyl-adenosine
  modified_base 6: mod_base = um
  modified_base 7: mod_base = OTHER; note = 2'-Fluoro-uridine
  modified_base 8: mod_base = um
  modified_base 9: mod_base = OTHER; note = 2'-Fluoro-cytidine
  modified_base 10: mod_base = OTHER; note = 2'-Fluoro-uridine
  modified_base 11: mod_base = OTHER; note = 2'-Fluoro-guanosine
  modified_base 12: mod_base = OTHER; note = 2'-O-methyl-adenosine
  modified_base 13: mod_base = OTHER; note = 2'-O-methyl-adenosine
  modified_base 14: mod_base = um
  modified_base 15: mod_base = gm
  modified_base 16: mod_base = um
  modified_base 17: mod_base = OTHER; note = 2'-O-methyl-adenosine
  modified_base 18: mod_base = OTHER; note = 2'-O-methyl-adenosine
  modified_base 19: mod_base = OTHER; note = 2'-O-methyl-adenosine
  modified_base 20: mod_base = gm
  modified_base 21: mod_base = um
tctgatttctgaatgtaaagt

SEQ ID NO: 581 - RNA, 21 nt, synthetic construct
  source 1..21: mol_type = other RNA
  modified_base 1: mod_base = um
  modified_base 1^2: mod_base = OTHER; note = Phosphorothioate bond
  modified_base 2: mod_base = gm
  modified_base 2^3: mod_base = OTHER; note = Phosphorothioate bond
  modified_base 3: mod_base = um
  modified_base 4: mod_base = OTHER; note = 2'-O-methyl-adenosine
  modified_base 5: mod_base = OTHER; note = 2'-O-methyl-adenosine
  modified_base 6: mod_base = OTHER; note = 2'-O-methyl-adenosine
  modified_base 7: mod_base = OTHER; note = 2'-Fluoro-cytidine
  modified_base 8: mod_base = um
  modified_base 9: mod_base = OTHER; note = 2'-Fluoro-uridine
  modified_base 10: mod_base = OTHER; note = 2'-Fluoro-guanosine
  modified_base 11: mod_base = OTHER; note = 2'-Fluoro-adenosine
  modified_base 12: mod_base = OTHER; note = 2'-O-methyl-adenosine
  modified_base 13: mod_base = um
  modified_base 14: mod_base = um
  modified_base 15: mod_base = um
  modified_base 16: mod_base = cm
  modified_base 17: mod_base = cm
  modified_base 18: mod_base = um
  modified_base 19: mod_base = OTHER; note = 2'-O-methyl-adenosine
  modified_base 20: mod_base = um
  modified_base 21: mod_base = gm
tgtaaacttgaatttcctatg

SEQ ID NO: 582 - RNA, 21 nt, synthetic construct
  source 1..21: mol_type = other RNA
  modified_base 1: mod_base = gm
  modified_base 1^2: mod_base = OTHER; note = Phosphorothioate bond
  modified_base 2: mod_base = um
  modified_base 2^3: mod_base = OTHER; note = Phosphorothioate bond
  modified_base 3: mod_base = gm
  modified_base 4: mod_base = um
  modified_base 5: mod_base = cm
  modified_base 6: mod_base = um
  modified_base 7: mod_base = OTHER; note = 2'-Fluoro-cytidine
  modified_base 8: mod_base = um
  modified_base 9: mod_base = OTHER; note = 2'-Fluoro-guanosine
  modified_base 10: mod_base = OTHER; note = 2'-Fluoro-cytidine
  modified_base 11: mod_base = OTHER; note = 2'-Fluoro-uridine
  modified_base 12: mod_base = cm
  modified_base 13: mod_base = um
  modified_base 14: mod_base = OTHER; note = 2'-O-methyl-adenosine
  modified_base 15: mod_base = OTHER; note = 2'-O-methyl-adenosine
  modified_base 16: mod_base = gm
  modified_base 17: mod_base = um
  modified_base 18: mod_base = OTHER; note = 2'-O-methyl-adenosine
  modified_base 19: mod_base = OTHER; note = 2'-O-methyl-adenosine
  modified_base 20: mod_base = OTHER; note = 2'-O-methyl-adenosine
  modified_base 21: mod_base = cm
gtgtctctgctctaagtaaac

SEQ ID NO: 583 - RNA, 21 nt, synthetic construct
  source 1..21: mol_type = other RNA
  modified_base 1: mod_base = cm
  modified_base 1^2: mod_base = OTHER; note = Phosphorothioate bond
  modified_base 2: mod_base = um
  modified_base 2^3: mod_base = OTHER; note = Phosphorothioate bond
  modified_base 3: mod_base = gm
  modified_base 4: mod_base = cm
  modified_base 5: mod_base = gm
  modified_base 6: mod_base = um
  modified_base 7: mod_base = OTHER; note = 2'-Fluoro-cytidine
  modified_base 8: mod_base = um
  modified_base 9: mod_base = OTHER; note = 2'-Fluoro-cytidine
  modified_base 10: mod_base = OTHER; note = 2'-Fluoro-uridine
  modified_base 11: mod_base = OTHER; note = 2'-Fluoro-cytidine
  modified_base 12: mod_base = cm
  modified_base 13: mod_base = um
  modified_base 14: mod_base = cm
  modified_base 15: mod_base = OTHER; note = 2'-O-methyl-adenosine
  modified_base 16: mod_base = cm
  modified_base 17: mod_base = OTHER; note = 2'-O-methyl-adenosine
  modified_base 18: mod_base = OTHER; note = 2'-O-methyl-adenosine
  modified_base 19: mod_base = gm
  modified_base 20: mod_base = gm
  modified_base 21: mod_base = um
ctgcgtctctcctcacaaggt

SEQ ID NO: 584 - RNA, 21 nt, synthetic construct
  source 1..21: mol_type = other RNA
  modified_base 1: mod_base = um
  modified_base 1^2: mod_base = OTHER; note = Phosphorothioate bond
  modified_base 2: mod_base = um
  modified_base 2^3: mod_base = OTHER; note = Phosphorothioate bond
  modified_base 3: mod_base = OTHER; note = 2'-O-methyl-adenosine
  modified_base 4: mod_base = um
  modified_base 5: mod_base = gm
  modified_base 6: mod_base = um
  modified_base 7: mod_base = OTHER; note = 2'-Fluoro-uridine
  modified_base 8: mod_base = cm
  modified_base 9: mod_base = OTHER; note = 2'-Fluoro-adenosine
  modified_base 10: mod_base = OTHER; note = 2'-Fluoro-guanosine
  modified_base 11: mod_base = OTHER; note = 2'-Fluoro-uridine
  modified_base 12: mod_base = OTHER; note = 2'-O-methyl-adenosine
  modified_base 13: mod_base = um
  modified_base 14: mod_base = um
  modified_base 15: mod_base = um
  modified_base 16: mod_base = um
  modified_base 17: mod_base = gm
  modified_base 18: mod_base = gm
  modified_base 19: mod_base = OTHER; note = 2'-O-methyl-adenosine
  modified_base 20: mod_base = gm
  modified_base 21: mod_base = gm
ttatgttcagtattttggagg

SEQ ID NO: 585 - RNA, 21 nt, synthetic construct
  source 1..21: mol_type = other RNA
  modified_base 1: mod_base = cm
  modified_base 1^2: mod_base = OTHER; note = Phosphorothioate bond
  modified_base 2: mod_base = OTHER; note = 2'-O-methyl-adenosine
  modified_base 2^3: mod_base = OTHER; note = Phosphorothioate bond
  modified_base 3: mod_base = cm
  modified_base 4: mod_base = OTHER; note = 2'-O-methyl-adenosine
  modified_base 5: mod_base = gm
  modified_base 6: mod_base = um
  modified_base 7: mod_base = OTHER; note = 2'-Fluoro-guanosine
  modified_base 8: mod_base = gm
  modified_base 9: mod_base = OTHER; note = 2'-Fluoro-adenosine
  modified_base 10: mod_base = OTHER; note = 2'-Fluoro-cytidine
  modified_base 11: mod_base = OTHER; note = 2'-Fluoro-adenosine
  modified_base 12: mod_base = um
  modified_base 13: mod_base = cm
  modified_base 14: mod_base = gm
  modified_base 15: mod_base = gm
  modified_base 16: mod_base = gm
  modified_base 17: mod_base = OTHER; note = 2'-O-methyl-adenosine
  modified_base 18: mod_base = cm
  modified_base 19: mod_base = OTHER; note = 2'-O-methyl-adenosine
  modified_base 20: mod_base = cm
  modified_base 21: mod_base = cm
cacagtggacatcgggacacc

SEQ ID NO: 586 - RNA, 21 nt, synthetic construct
  source 1..21: mol_type = other RNA
  modified_base 1: mod_base = um
  modified_base 1^2: mod_base = OTHER; note = Phosphorothioate bond
  modified_base 2: mod_base = cm
  modified_base 2^3: mod_base = OTHER; note = Phosphorothioate bond
  modified_base 3: mod_base = um
  modified_base 4: mod_base = gm
  modified_base 5: mod_base = cm
  modified_base 6: mod_base = um
  modified_base 7: mod_base = OTHER; note = 2'-Fluoro-cytidine
  modified_base 8: mod_base = um
  modified_base 9: mod_base = OTHER; note = 2'-Fluoro-adenosine
  modified_base 10: mod_base = OTHER; note = 2'-Fluoro-adenosine
  modified_base 11: mod_base = OTHER; note = 2'-Fluoro-guanosine
  modified_base 12: mod_base = um
  modified_base 13: mod_base = OTHER; note = 2'-O-methyl-adenosine
  modified_base 14: mod_base = OTHER; note = 2'-O-methyl-adenosine
  modified_base 15: mod_base = OTHER; note = 2'-O-methyl-adenosine
  modified_base 16: mod_base = cm
  modified_base 17: mod_base = OTHER; note = 2'-O-methyl-adenosine
  modified_base 18: mod_base = OTHER; note = 2'-O-methyl-adenosine
  modified_base 19: mod_base = cm
  modified_base 20: mod_base = OTHER; note = 2'-O-methyl-adenosine
  modified_base 21: mod_base = gm
tctgctctaagtaaacaacag

SEQ ID NO: 587 - RNA, 21 nt, synthetic construct
  source 1..21: mol_type = other RNA
  modified_base 1: mod_base = cm
  modified_base 1^2: mod_base = OTHER; note = Phosphorothioate bond
  modified_base 2: mod_base = gm
  modified_base 2^3: mod_base = OTHER; note = Phosphorothioate bond
  modified_base 3: mod_base = gm
  modified_base 4: mod_base = cm
  modified_base 5: mod_base = OTHER; note = 2'-O-methyl-adenosine
  modified_base 6: mod_base = cm
  modified_base 7: mod_base = OTHER; note = 2'-Fluoro-adenosine
  modified_base 8: mod_base = um
  modified_base 9: mod_base = OTHER; note = 2'-Fluoro-uridine
  modified_base 10: mod_base = OTHER; note = 2'-Fluoro-uridine
  modified_base 11: mod_base = OTHER; note = 2'-Fluoro-cytidine
  modified_base 12: mod_base = cm
  modified_base 13: mod_base = gm
  modified_base 14: mod_base = um
  modified_base 15: mod_base = um
  modified_base 16: mod_base = gm
  modified_base 17: mod_base = cm
  modified_base 18: mod_base = OTHER; note = 2'-O-methyl-adenosine
  modified_base 19: mod_base = OTHER; note = 2'-O-methyl-adenosine
  modified_base 20: mod_base = um
  modified_base 21: mod_base = gm
cggcacatttccgttgcaatg

SEQ ID NO: 588 - RNA, 21 nt, synthetic construct
  source 1..21: mol_type = other RNA
  modified_base 1: mod_base = um
  modified_base 1^2: mod_base = OTHER; note = Phosphorothioate bond
  modified_base 2: mod_base = cm
  modified_base 2^3: mod_base = OTHER; note = Phosphorothioate bond
  modified_base 3: mod_base = OTHER; note = 2'-O-methyl-adenosine
  modified_base 4: mod_base = gm
  modified_base 5: mod_base = um
  modified_base 6: mod_base = OTHER; note = 2'-O-methyl-adenosine
  modified_base 7: mod_base = OTHER; note = 2'-Fluoro-uridine
  modified_base 8: mod_base = um
  modified_base 9: mod_base = OTHER; note = 2'-Fluoro-uridine
  modified_base 10: mod_base = OTHER; note = 2'-Fluoro-uridine
  modified_base 11: mod_base = OTHER; note = 2'-Fluoro-guanosine
  modified_base 12: mod_base = gm
  modified_base 13: mod_base = OTHER; note = 2'-O-methyl-adenosine
  modified_base 14: mod_base = gm
  modified_base 15: mod_base = gm
  modified_base 16: mod_base = um
  modified_base 17: mod_base = gm
  modified_base 18: mod_base = um
  modified_base 19: mod_base = cm
  modified_base 20: mod_base = um
  modified_base 21: mod_base = cm
tcagtattttggaggtgtctc

SEQ ID NO: 589 - RNA, 21 nt, synthetic construct
  source 1..21: mol_type = other RNA
  modified_base 1: mod_base = gm
  modified_base 1^2: mod_base = OTHER; note = Phosphorothioate bond
  modified_base 2: mod_base = cm
  modified_base 2^3: mod_base = OTHER; note = Phosphorothioate bond
  modified_base 3: mod_base = OTHER; note = 2'-O-methyl-adenosine
  modified_base 4: mod_base = cm
  modified_base 5: mod_base = OTHER; note = 2'-O-methyl-adenosine
  modified_base 6: mod_base = um
  modified_base 7: mod_base = OTHER; note = 2'-Fluoro-uridine
  modified_base 8: mod_base = um
  modified_base 9: mod_base = OTHER; note = 2'-Fluoro-cytidine
  modified_base 10: mod_base = OTHER; note = 2'-Fluoro-cytidine
  modified_base 11: mod_base = OTHER; note = 2'-Fluoro-guanosine
  modified_base 12: mod_base = um
  modified_base 13: mod_base = um
  modified_base 14: mod_base = gm
  modified_base 15: mod_base = cm
  modified_base 16: mod_base = OTHER; note = 2'-O-methyl-adenosine
  modified_base 17: mod_base = OTHER; note = 2'-O-methyl-adenosine
  modified_base 18: mod_base = um
  modified_base 19: mod_base = gm
  modified_base 20: mod_base = gm
  modified_base 21: mod_base = OTHER; note = 2'-O-methyl-adenosine
gcacatttccgttgcaatgga

SEQ ID NO: 590 - RNA, 21 nt, synthetic construct
  source 1..21: mol_type = other RNA
  modified_base 1: mod_base = cm
  modified_base 1^2: mod_base = OTHER; note = Phosphorothioate bond
  modified_base 2: mod_base = OTHER; note = 2'-O-methyl-adenosine
  modified_base 2^3: mod_base = OTHER; note = Phosphorothioate bond
  modified_base 3: mod_base = um
  modified_base 4: mod_base = gm
  modified_base 5: mod_base = cm
  modified_base 6: mod_base = um
  modified_base 7: mod_base = OTHER; note = 2'-Fluoro-adenosine
  modified_base 8: mod_base = um
  modified_base 9: mod_base = OTHER; note = 2'-Fluoro-guanosine
  modified_base 10: mod_base = OTHER; note = 2'-Fluoro-uridine
  modified_base 11: mod_base = OTHER; note = 2'-Fluoro-adenosine
  modified_base 12: mod_base = OTHER; note = 2'-O-methyl-adenosine
  modified_base 13: mod_base = OTHER; note = 2'-O-methyl-adenosine
  modified_base 14: mod_base = cm
  modified_base 15: mod_base = um
  modified_base 16: mod_base = um
  modified_base 17: mod_base = gm
  modified_base 18: mod_base = OTHER; note = 2'-O-methyl-adenosine
  modified_base 19: mod_base = OTHER; note = 2'-O-methyl-adenosine
  modified_base 20: mod_base = um
  modified_base 21: mod_base = um
catgctatgtaaacttgaatt

SEQ ID NO: 591 - RNA, 21 nt, synthetic construct
  source 1..21: mol_type = other RNA
  modified_base 1: mod_base = OTHER; note = 2'-O-methyl-adenosine
  modified_base 1^2: mod_base = OTHER; note = Phosphorothioate bond
  modified_base 2: mod_base = um
  modified_base 2^3: mod_base = OTHER; note = Phosphorothioate bond
  modified_base 3: mod_base = cm
  modified_base 4: mod_base = cm
  modified_base 5: mod_base = um
  modified_base 6: mod_base = cm
  modified_base 7: mod_base = OTHER; note = 2'-Fluoro-adenosine
  modified_base 8: mod_base = gm
  modified_base 9: mod_base = OTHER; note = 2'-Fluoro-adenosine
  modified_base 10: mod_base = OTHER; note = 2'-Fluoro-guanosine
  modified_base 11: mod_base = OTHER; note = 2'-Fluoro-guanosine
  modified_base 12: mod_base = um
  modified_base 13: mod_base = um
  modified_base 14: mod_base = um
  modified_base 15: mod_base = gm
  modified_base 16: mod_base = OTHER; note = 2'-O-methyl-adenosine
  modified_base 17: mod_base = cm
  modified_base 18: mod_base = cm
  modified_base 19: mod_base = gm
  modified_base 20: mod_base = OTHER; note = 2'-O-methyl-adenosine
  modified_base 21: mod_base = OTHER; note = 2'-O-methyl-adenosine
atcctcagaggtttgaccgaa

SEQ ID NO: 592 - RNA, 21 nt, synthetic construct
  source 1..21: mol_type = other RNA
  modified_base 1: mod_base = um
  modified_base 1^2: mod_base = OTHER; note = Phosphorothioate bond
  modified_base 2: mod_base = cm
  modified_base 2^3: mod_base = OTHER; note = Phosphorothioate bond
  modified_base 3: mod_base = OTHER; note = 2'-O-methyl-adenosine
  modified_base 4: mod_base = cm
  modified_base 5: mod_base = OTHER; note = 2'-O-methyl-adenosine
  modified_base 6: mod_base = gm
  modified_base 7: mod_base = OTHER; note = 2'-Fluoro-uridine
  modified_base 8: mod_base = gm
  modified_base 9: mod_base = OTHER; note = 2'-Fluoro-guanosine
  modified_base 10: mod_base = OTHER; note = 2'-Fluoro-adenosine
  modified_base 11: mod_base = OTHER; note = 2'-Fluoro-cytidine
  modified_base 12: mod_base = OTHER; note = 2'-O-methyl-adenosine
  modified_base 13: mod_base = um
  modified_base 14: mod_base = cm
  modified_base 15: mod_base = gm
  modified_base 16: mod_base = gm
  modified_base 17: mod_base = gm
  modified_base 18: mod_base = OTHER; note = 2'-O-methyl-adenosine
  modified_base 19: mod_base = cm
  modified_base 20: mod_base = OTHER; note = 2'-O-methyl-adenosine
  modified_base 21: mod_base = cm
tcacagtggacatcgggacac

SEQ ID NO: 593 - RNA, 21 nt, synthetic construct
  source 1..21: mol_type = other RNA
  modified_base 1: mod_base = cm
  modified_base 1^2: mod_base = OTHER; note = Phosphorothioate bond
  modified_base 2: mod_base = um
  modified_base 2^3: mod_base = OTHER; note = Phosphorothioate bond
  modified_base 3: mod_base = um
  modified_base 4: mod_base = um
  modified_base 5: mod_base = cm
  modified_base 6: mod_base = OTHER; note = 2'-O-methyl-adenosine
  modified_base 7: mod_base = OTHER; note = 2'-Fluoro-adenosine
  modified_base 8: mod_base = gm
  modified_base 9: mod_base = OTHER; note = 2'-Fluoro-adenosine
  modified_base 10: mod_base = OTHER; note = 2'-Fluoro-adenosine
  modified_base 11: mod_base = OTHER; note = 2'-Fluoro-guanosine
  modified_base 12: mod_base = cm
  modified_base 13: mod_base = cm
  modified_base 14: mod_base = um
  modified_base 15: mod_base = um
  modified_base 16: mod_base = gm
  modified_base 17: mod_base = OTHER; note = 2'-O-methyl-adenosine
  modified_base 18: mod_base = OTHER; note = 2'-O-methyl-adenosine
  modified_base 19: mod_base = gm
  modified_base 20: mod_base = gm
  modified_base 21: mod_base = OTHER; note = 2'-O-methyl-adenosine
ctttcaagaagccttgaagga

SEQ ID NO: 594 - RNA, 21 nt, synthetic construct
  source 1..21: mol_type = other RNA
  modified_base 1: mod_base = OTHER; note = 2'-O-methyl-adenosine
  modified_base 1^2: mod_base = OTHER; note = Phosphorothioate bond
  modified_base 2: mod_base = gm
  modified_base 2^3: mod_base = OTHER; note = Phosphorothioate bond
  modified_base 3: mod_base = gm
  modified_base 4: mod_base = um
  modified_base 5: mod_base = gm
  modified_base 6: mod_base = um
  modified_base 7: mod_base = OTHER; note = 2'-Fluoro-cytidine
  modified_base 8: mod_base = um
  modified_base 9: mod_base = OTHER; note = 2'-Fluoro-cytidine
  modified_base 10: mod_base = OTHER; note = 2'-Fluoro-uridine
  modified_base 11: mod_base = OTHER; note = 2'-Fluoro-guanosine
  modified_base 12: mod_base = cm
  modified_base 13: mod_base = um
  modified_base 14: mod_base = cm
  modified_base 15: mod_base = um
  modified_base 16: mod_base = OTHER; note = 2'-O-methyl-adenosine
  modified_base 17: mod_base = OTHER; note = 2'-O-methyl-adenosine
  modified_base 18: mod_base = gm
  modified_base 19: mod_base = um
  modified_base 20: mod_base = OTHER; note = 2'-O-methyl-adenosine
  modified_base 21: mod_base = OTHER; note = 2'-O-methyl-adenosine
aggtgtctctgctctaagtaa

SEQ ID NO: 595 - RNA, 21 nt, synthetic construct
  source 1..21: mol_type = other RNA
  modified_base 1: mod_base = um
  modified_base 1^2: mod_base = OTHER; note = Phosphorothioate bond
  modified_base 2: mod_base = um
  modified_base 2^3: mod_base = OTHER; note = Phosphorothioate bond
  modified_base 3: mod_base = um
  modified_base 4: mod_base = um
  modified_base 5: mod_base = gm
  modified_base 6: mod_base = gm
  modified_base 7: mod_base = OTHER; note = 2'-Fluoro-adenosine
  modified_base 8: mod_base = gm
  modified_base 9: mod_base = OTHER; note = 2'-Fluoro-guanosine
  modified_base 10: mod_base = OTHER; note = 2'-Fluoro-uridine
  modified_base 11: mod_base = OTHER; note = 2'-Fluoro-guanosine
  modified_base 12: mod_base = um
  modified_base 13: mod_base = cm
  modified_base 14: mod_base = um
  modified_base 15: mod_base = cm
  modified_base 16: mod_base = um
  modified_base 17: mod_base = gm
  modified_base 18: mod_base = cm
  modified_base 19: mod_base = um
  modified_base 20: mod_base = cm
  modified_base 21: mod_base = um
ttttggaggtgtctctgctct

SEQ ID NO: 596 - RNA, 21 nt, synthetic construct
  source 1..21: mol_type = other RNA
  modified_base 1: mod_base = gm
  modified_base 1^2: mod_base = OTHER; note = Phosphorothioate bond
  modified_base 2: mod_base = cm
  modified_base 2^3: mod_base = OTHER; note = Phosphorothioate bond
  modified_base 3: mod_base = OTHER; note = 2'-O-methyl-adenosine
  modified_base 4: mod_base = um
  modified_base 5: mod_base = gm
  modified_base 6: mod_base = OTHER; note = 2'-O-methyl-adenosine
  modified_base 7: mod_base = OTHER; note = 2'-Fluoro-adenosine
  modified_base 8: mod_base = um
  modified_base 9: mod_base = OTHER; note = 2'-Fluoro-guanosine
  modified_base 10: mod_base = OTHER; note = 2'-Fluoro-uridine
  modified_base 11: mod_base = OTHER; note = 2'-Fluoro-guanosine
  modified_base 12: mod_base = cm
  modified_base 13: mod_base = cm
  modified_base 14: mod_base = um
  modified_base 15: mod_base = um
  modified_base 16: mod_base = um
  modified_base 17: mod_base = um
  modified_base 18: mod_base = OTHER; note = 2'-O-methyl-adenosine
  modified_base 19: mod_base = OTHER; note = 2'-O-methyl-adenosine
  modified_base 20: mod_base = um
  modified_base 21: mod_base = um
gcatgaatgtgccttttaatt

SEQ ID NO: 597 - RNA, 21 nt, synthetic construct
  source 1..21: mol_type = other RNA
  modified_base 1: mod_base = OTHER; note = 2'-O-methyl-adenosine
  modified_base 1^2: mod_base = OTHER; note = Phosphorothioate bond
  modified_base 2: mod_base = cm
  modified_base 2^3: mod_base = OTHER; note = Phosphorothioate bond
  modified_base 3: mod_base = OTHER; note = 2'-O-methyl-adenosine
  modified_base 4: mod_base = um
  modified_base 5: mod_base = cm
  modified_base 6: mod_base = gm
  modified_base 7: mod_base = OTHER; note = 2'-Fluoro-guanosine
  modified_base 8: mod_base = gm
  modified_base 9: mod_base = OTHER; note = 2'-Fluoro-adenosine
  modified_base 10: mod_base = OTHER; note = 2'-Fluoro-cytidine
  modified_base 11: mod_base = OTHER; note = 2'-Fluoro-adenosine
  modified_base 12: mod_base = cm
  modified_base 13: mod_base = cm
  modified_base 14: mod_base = gm
  modified_base 15: mod_base = OTHER; note = 2'-O-methyl-adenosine
  modified_base 16: mod_base = gm
  modified_base 17: mod_base = cm
  modified_base 18: mod_base = um
  modified_base 19: mod_base = OTHER; note = 2'-O-methyl-adenosine
  modified_base 20: mod_base = gm
  modified_base 21: mod_base = cm
acatcgggacaccgagctagc

SEQ ID NO: 598 - RNA, 21 nt, synthetic construct
  source 1..21: mol_type = other RNA
  modified_base 1: mod_base = OTHER; note = 2'-O-methyl-adenosine
  modified_base 1^2: mod_base = OTHER; note = Phosphorothioate bond
  modified_base 2: mod_base = cm
  modified_base 2^3: mod_base = OTHER; note = Phosphorothioate bond
  modified_base 3: mod_base = um
  modified_base 4: mod_base = gm
  modified_base 5: mod_base = cm
  modified_base 6: mod_base = gm
  modified_base 7: mod_base = OTHER; note = 2'-Fluoro-uridine
  modified_base 8: mod_base = cm
  modified_base 9: mod_base = OTHER; note = 2'-Fluoro-uridine
  modified_base 10: mod_base = OTHER; note = 2'-Fluoro-cytidine
  modified_base 11: mod_base = OTHER; note = 2'-Fluoro-uridine
  modified_base 12: mod_base = cm
  modified_base 13: mod_base = cm
  modified_base 14: mod_base = um
  modified_base 15: mod_base = cm
  modified_base 16: mod_base = OTHER; note = 2'-O-methyl-adenosine
  modified_base 17: mod_base = cm
  modified_base 18: mod_base = OTHER; note = 2'-O-methyl-adenosine
  modified_base 19: mod_base = OTHER; note = 2'-O-methyl-adenosine
  modified_base 20: mod_base = gm
  modified_base 21: mod_base = gm
actgcgtctctcctcacaagg

SEQ ID NO: 599 - RNA, 21 nt, synthetic construct
  source 1..21: mol_type = other RNA
  modified_base 1: mod_base = gm
  modified_base 1^2: mod_base = OTHER; note = Phosphorothioate bond
  modified_base 2: mod_base = um
  modified_base 2^3: mod_base = OTHER; note = Phosphorothioate bond
  modified_base 3: mod_base = OTHER; note = 2'-O-methyl-adenosine
  modified_base 4: mod_base = um
  modified_base 5: mod_base = OTHER; note = 2'-O-methyl-adenosine
  modified_base 6: mod_base = cm
  modified_base 7: mod_base = OTHER; note = 2'-Fluoro-cytidine
  modified_base 8: mod_base = cm
  modified_base 9: mod_base = OTHER; note = 2'-Fluoro-adenosine
  modified_base 10: mod_base = OTHER; note = 2'-Fluoro-adenosine
  modified_base 11: mod_base = OTHER; note = 2'-Fluoro-adenosine
  modified_base 12: mod_base = um
  modified_base 13: mod_base = cm
  modified_base 14: mod_base = OTHER; note = 2'-O-methyl-adenosine
  modified_base 15: mod_base = cm
  modified_base 16: mod_base = OTHER; note = 2'-O-methyl-adenosine
  modified_base 17: mod_base = gm
  modified_base 18: mod_base = um
  modified_base 19: mod_base = gm
  modified_base 20: mod_base = gm
  modified_base 21: mod_base = OTHER; note = 2'-O-methyl-adenosine
gtatacccaaatcacagtgga

SEQ ID NO: 600 - RNA, 21 nt, synthetic construct
  source 1..21: mol_type = other RNA
  modified_base 1: mod_base = um
  modified_base 1^2: mod_base = OTHER; note = Phosphorothioate bond
  modified_base 2: mod_base = gm
  modified_base 2^3: mod_base = OTHER; note = Phosphorothioate bond
  modified_base 3: mod_base = cm
  modified_base 4: mod_base = um
  modified_base 5: mod_base = gm
  modified_base 6: mod_base = gm
  modified_base 7: mod_base = OTHER; note = 2'-Fluoro-adenosine
  modified_base 8: mod_base = um
  modified_base 9: mod_base = OTHER; note = 2'-Fluoro-guanosine
  modified_base 10: mod_base = OTHER; note = 2'-Fluoro-uridine
  modified_base 11: mod_base = OTHER; note = 2'-Fluoro-adenosine
  modified_base 12: mod_base = cm
  modified_base 13: mod_base = OTHER; note = 2'-O-methyl-adenosine
  modified_base 14: mod_base = gm
  modified_base 15: mod_base = OTHER; note = 2'-O-methyl-adenosine
  modified_base 16: mod_base = gm
  modified_base 17: mod_base = OTHER; note = 2'-O-methyl-adenosine
  modified_base 18: mod_base = um
  modified_base 19: mod_base = OTHER; note = 2'-O-methyl-adenosine
  modified_base 20: mod_base = cm
  modified_base 21: mod_base = cm
tgctggatgtacagagatacc

SEQ ID NO: 601 - RNA, 21 nt, synthetic construct
  source 1..21: mol_type = other RNA
  modified_base 1: mod_base = OTHER; note = 2'-O-methyl-adenosine
  modified_base 1^2: mod_base = OTHER; note = Phosphorothioate bond
  modified_base 2: mod_base = um
  modified_base 2^3: mod_base = OTHER; note = Phosphorothioate bond
  modified_base 3: mod_base = gm
  modified_base 4: mod_base = um
  modified_base 5: mod_base = OTHER; note = 2'-O-methyl-adenosine
  modified_base 6: mod_base = OTHER; note = 2'-O-methyl-adenosine
  modified_base 7: mod_base = OTHER; note = 2'-Fluoro-adenosine
  modified_base 8: mod_base = cm
  modified_base 9: mod_base = OTHER; note = 2'-Fluoro-uridine
  modified_base 10: mod_base = OTHER; note = 2'-Fluoro-uridine
  modified_base 11: mod_base = OTHER; note = 2'-Fluoro-guanosine
  modified_base 12: mod_base = OTHER; note = 2'-O-methyl-adenosine
  modified_base 13: mod_base = OTHER; note = 2'-O-methyl-adenosine
  modified_base 14: mod_base = um
  modified_base 15: mod_base = um
  modified_base 16: mod_base = um
  modified_base 17: mod_base = cm
  modified_base 18: mod_base = cm
  modified_base 19: mod_base = um
  modified_base 20: mod_base = OTHER; note = 2'-O-methyl-adenosine
  modified_base 21: mod_base = um
atgtaaacttgaatttcctat

SEQ ID NO: 602 - RNA, 21 nt, synthetic construct
  source 1..21: mol_type = other RNA
  modified_base 1: mod_base = gm
  modified_base 1^2: mod_base = OTHER; note = Phosphorothioate bond
  modified_base 2: mod_base = gm
  modified_base 2^3: mod_base = OTHER; note = Phosphorothioate bond
  modified_base 3: mod_base = gm
  modified_base 4: mod_base = gm
  modified_base 5: mod_base = cm
  modified_base 6: mod_base = um
  modified_base 7: mod_base = OTHER; note = 2'-Fluoro-guanosine
  modified_base 8: mod_base = gm
  modified_base 9: mod_base = OTHER; note = 2'-Fluoro-guanosine
  modified_base 10: mod_base = OTHER; note = 2'-Fluoro-guanosine
  modified_base 11: mod_base = OTHER; note = 2'-Fluoro-adenosine
  modified_base 12: mod_base = gm
  modified_base 13: mod_base = gm
  modified_base 14: mod_base = OTHER; note = 2'-O-methyl-adenosine
  modified_base 15: mod_base = gm
  modified_base 16: mod_base = OTHER; note = 2'-O-methyl-adenosine
  modified_base 17: mod_base = OTHER; note = 2'-O-methyl-adenosine
  modified_base 18: mod_base = gm
  modified_base 19: mod_base = OTHER; note = 2'-O-methyl-adenosine
  modified_base 20: mod_base = um
  modified_base 21: mod_base = gm
ggggctggggaggagaagatg

SEQ ID NO: 603 - RNA, 21 nt, synthetic construct
  source 1..21: mol_type = other RNA
  modified_base 1: mod_base = cm
  modified_base 1^2: mod_base = OTHER; note = Phosphorothioate bond
  modified_base 2: mod_base = um
  modified_base 2^3: mod_base = OTHER; note = Phosphorothioate bond
  modified_base 3: mod_base = cm
  modified_base 4: mod_base = um
  modified_base 5: mod_base = gm
  modified_base 6: mod_base = cm
  modified_base 7: mod_base = OTHER; note = 2'-Fluoro-uridine
  modified_base 8: mod_base = cm
  modified_base 9: mod_base = OTHER; note = 2'-Fluoro-uridine
  modified_base 10: mod_base = OTHER; note = 2'-Fluoro-adenosine
  modified_base 11: mod_base = OTHER; note = 2'-Fluoro-adenosine
  modified_base 12: mod_base = gm
  modified_base 13: mod_base = um
  modified_base 14: mod_base = OTHER; note = 2'-O-methyl-adenosine
  modified_base 15: mod_base = OTHER; note = 2'-O-methyl-adenosine
  modified_base 16: mod_base = OTHER; note = 2'-O-methyl-adenosine
  modified_base 17: mod_base = cm
  modified_base 18: mod_base = OTHER; note = 2'-O-methyl-adenosine
  modified_base 19: mod_base = OTHER; note = 2'-O-methyl-adenosine
  modified_base 20: mod_base = cm
  modified_base 21: mod_base = OTHER; note = 2'-O-methyl-adenosine
ctctgctctaagtaaacaaca

SEQ ID NO: 604 - RNA, 21 nt, synthetic construct
  source 1..21: mol_type = other RNA
  modified_base 1: mod_base = um
  modified_base 1^2: mod_base = OTHER; note = Phosphorothioate bond
  modified_base 2: mod_base = gm
  modified_base 2^3: mod_base = OTHER; note = Phosphorothioate bond
  modified_base 3: mod_base = gm
  modified_base 4: mod_base = gm
  modified_base 5: mod_base = gm
  modified_base 6: mod_base = cm
  modified_base 7: mod_base = OTHER; note = 2'-Fluoro-uridine
  modified_base 8: mod_base = gm
  modified_base 9: mod_base = OTHER; note = 2'-Fluoro-guanosine
  modified_base 10: mod_base = OTHER; note = 2'-Fluoro-guanosine
  modified_base 11: mod_base = OTHER; note = 2'-Fluoro-guanosine
  modified_base 12: mod_base = OTHER; note = 2'-O-methyl-adenosine
  modified_base 13: mod_base = gm
  modified_base 14: mod_base = gm
  modified_base 15: mod_base = OTHER; note = 2'-O-methyl-adenosine
  modified_base 16: mod_base = gm
  modified_base 17: mod_base = OTHER; note = 2'-O-methyl-adenosine
  modified_base 18: mod_base = OTHER; note = 2'-O-methyl-adenosine
  modified_base 19: mod_base = gm
  modified_base 20: mod_base = OTHER; note = 2'-O-methyl-adenosine
  modified_base 21: mod_base = um
tggggctggggaggagaagat

SEQ ID NO: 605 - RNA, 21 nt, synthetic construct
  source 1..21: mol_type = other RNA
  modified_base 1: mod_base = OTHER; note = 2'-O-methyl-adenosine
  modified_base 1^2: mod_base = OTHER; note = Phosphorothioate bond
  modified_base 2: mod_base = OTHER; note = 2'-O-methyl-adenosine
  modified_base 2^3: mod_base = OTHER; note = Phosphorothioate bond
  modified_base 3: mod_base = um
  modified_base 4: mod_base = cm
  modified_base 5: mod_base = OTHER; note = 2'-O-methyl-adenosine
  modified_base 6: mod_base = cm
  modified_base 7: mod_base = OTHER; note = 2'-Fluoro-adenosine
  modified_base 8: mod_base = gm
  modified_base 9: mod_base = OTHER; note = 2'-Fluoro-uridine
  modified_base 10: mod_base = OTHER; note = 2'-Fluoro-guanosine
  modified_base 11: mod_base = OTHER; note = 2'-Fluoro-guanosine
  modified_base 12: mod_base = OTHER; note = 2'-O-methyl-adenosine
  modified_base 13: mod_base = cm
  modified_base 14: mod_base = OTHER; note = 2'-O-methyl-adenosine
  modified_base 15: mod_base = um
  modified_base 16: mod_base = cm
  modified_base 17: mod_base = gm
  modified_base 18: mod_base = gm
  modified_base 19: mod_base = gm
  modified_base 20: mod_base = OTHER; note = 2'-O-methyl-adenosine
  modified_base 21: mod_base = cm
aatcacagtggacatcgggac

SEQ ID NO: 606 - RNA, 21 nt, synthetic construct
  source 1..21: mol_type = other RNA
  modified_base 1: mod_base = OTHER; note = 2'-O-methyl-adenosine
  modified_base 1^2: mod_base = OTHER; note = Phosphorothioate bond
  modified_base 2: mod_base = gm
  modified_base 2^3: mod_base = OTHER; note = Phosphorothioate bond
  modified_base 3: mod_base = um
  modified_base 4: mod_base = gm
  modified_base 5: mod_base = gm
  modified_base 6: mod_base = OTHER; note = 2'-O-methyl-adenosine
  modified_base 7: mod_base = OTHER; note = 2'-Fluoro-cytidine
  modified_base 8: mod_base = OTHER; note = 2'-O-methyl-adenosine
  modified_base 9: mod_base = OTHER; note = 2'-Fluoro-uridine
  modified_base 10: mod_base = OTHER; note = 2'-Fluoro-cytidine
  modified_base 11: mod_base = OTHER; note = 2'-Fluoro-guanosine
  modified_base 12: mod_base = gm
  modified_base 13: mod_base = gm
  modified_base 14: mod_base = OTHER; note = 2'-O-methyl-adenosine
  modified_base 15: mod_base = cm
  modified_base 16: mod_base = OTHER; note = 2'-O-methyl-adenosine
  modified_base 17: mod_base = cm
  modified_base 18: mod_base = cm
  modified_base 19: mod_base = gm
  modified_base 20: mod_base = OTHER; note = 2'-O-methyl-adenosine
  modified_base 21: mod_base = gm
agtggacatcgggacaccgag

SEQ ID NO: 607 - RNA, 21 nt, synthetic construct
  source 1..21: mol_type = other RNA
  modified_base 1: mod_base = OTHER; note = 2'-O-methyl-adenosine
  modified_base 1^2: mod_base = OTHER; note = Phosphorothioate bond
  modified_base 2: mod_base = OTHER; note = 2'-O-methyl-adenosine
  modified_base 2^3: mod_base = OTHER; note = Phosphorothioate bond
  modified_base 3: mod_base = um
  modified_base 4: mod_base = OTHER; note = 2'-O-methyl-adenosine
  modified_base 5: mod_base = OTHER; note = 2'-O-methyl-adenosine
  modified_base 6: mod_base = um
  modified_base 7: mod_base = OTHER; note = 2'-Fluoro-uridine
  modified_base 8: mod_base = OTHER; note = 2'-O-methyl-adenosine
  modified_base 9: mod_base = OTHER; note = 2'-Fluoro-uridine
  modified_base 10: mod_base = OTHER; note = 2'-Fluoro-uridine
  modified_base 11: mod_base = OTHER; note = 2'-Fluoro-guanosine
  modified_base 12: mod_base = gm
  modified_base 13: mod_base = gm
  modified_base 14: mod_base = gm
  modified_base 15: mod_base = cm
  modified_base 16: mod_base = um
  modified_base 17: mod_base = gm
  modified_base 18: mod_base = gm
  modified_base 19: mod_base = gm
  modified_base 20: mod_base = gm
  modified_base 21: mod_base = OTHER; note = 2'-O-methyl-adenosine
aataattattggggctgggga

SEQ ID NO: 608 - RNA, 21 nt, synthetic construct
  source 1..21: mol_type = other RNA
  modified_base 1: mod_base = cm
  modified_base 1^2: mod_base = OTHER; note = Phosphorothioate bond
  modified_base 2: mod_base = OTHER; note = 2'-O-methyl-adenosine
  modified_base 2^3: mod_base = OTHER; note = Phosphorothioate bond
  modified_base 3: mod_base = gm
  modified_base 4: mod_base = um
  modified_base 5: mod_base = OTHER; note = 2'-O-methyl-adenosine
  modified_base 6: mod_base = um
  modified_base 7: mod_base = OTHER; note = 2'-Fluoro-uridine
  modified_base 8: mod_base = um
  modified_base 9: mod_base = OTHER; note = 2'-Fluoro-uridine
  modified_base 10: mod_base = OTHER; note = 2'-Fluoro-guanosine
  modified_base 11: mod_base = OTHER; note = 2'-Fluoro-guanosine
  modified_base 12: mod_base = OTHER; note = 2'-O-methyl-adenosine
  modified_base 13: mod_base = gm
  modified_base 14: mod_base = gm
  modified_base 15: mod_base = um
  modified_base 16: mod_base = gm
  modified_base 17: mod_base = um
  modified_base 18: mod_base = cm
  modified_base 19: mod_base = um
  modified_base 20: mod_base = cm
  modified_base 21: mod_base = um
cagtattttggaggtgtctct

SEQ ID NO: 609 - RNA, 21 nt, synthetic construct
  source 1..21: mol_type = other RNA
  modified_base 1: mod_base = OTHER; note = 2'-O-methyl-adenosine
  modified_base 1^2: mod_base = OTHER; note = Phosphorothioate bond
  modified_base 2: mod_base = um
  modified_base 2^3: mod_base = OTHER; note = Phosphorothioate bond
  modified_base 3: mod_base = um
  modified_base 4: mod_base = um
  modified_base 5: mod_base = um
  modified_base 6: mod_base = gm
  modified_base 7: mod_base = OTHER; note = 2'-Fluoro-guanosine
  modified_base 8: mod_base = OTHER; note = 2'-O-methyl-adenosine
  modified_base 9: mod_base = OTHER; note = 2'-Fluoro-guanosine
  modified_base 10: mod_base = OTHER; note = 2'-Fluoro-guanosine
  modified_base 11: mod_base = OTHER; note = 2'-Fluoro-uridine
  modified_base 12: mod_base = gm
  modified_base 13: mod_base = um
  modified_base 14: mod_base = cm
  modified_base 15: mod_base = um
  modified_base 16: mod_base = cm
  modified_base 17: mod_base = um
  modified_base 18: mod_base = gm
  modified_base 19: mod_base = cm
  modified_base 20: mod_base = um
  modified_base 21: mod_base = cm
attttggaggtgtctctgctc

SEQ ID NO: 610 - RNA, 21 nt, synthetic construct
  source 1..21: mol_type = other RNA
  modified_base <1: mod_base = OTHER; note = two inverted abasic nucleosides
  modified_base 1: mod_base = OTHER; note = 2'-O-methyl-adenosine
  modified_base 1^2: mod_base = OTHER; note = Phosphorothioate bond
  modified_base 2: mod_base = OTHER; note = 2'-O-methyl-adenosine
  modified_base 2^3: mod_base = OTHER; note = Phosphorothioate bond
  modified_base 3: mod_base = OTHER; note = 2'-O-methyl-adenosine
  modified_base 4: mod_base = cm
  modified_base 5: mod_base = um
  modified_base 6: mod_base = um
  modified_base 7: mod_base = OTHER; note = 2'-Fluoro-guanosine
  modified_base 8: mod_base = OTHER; note = 2'-O-methyl-adenosine
  modified_base 9: mod_base = OTHER; note = 2'-Fluoro-adenosine
  modified_base 10: mod_base = OTHER; note = 2'-Fluoro-uridine
  modified_base 11: mod_base = OTHER; note = 2'-Fluoro-uridine
  modified_base 12: mod_base = OTHER; note = 2'-Fluoro-uridine
  modified_base 13: mod_base = cm
  modified_base 14: mod_base = cm
  modified_base 15: mod_base = um
  modified_base 16: mod_base = OTHER; note = 2'-O-methyl-adenosine
  modified_base 17: mod_base = um
  modified_base 18: mod_base = gm
  modified_base 19: mod_base = um
  modified_base 20: mod_base = OTHER; note = 2'-O-methyl-adenosine
  modified_base 21: mod_base = um
aaacttgaatttcctatgtat

SEQ ID NO: 611 - RNA, 21 nt, synthetic construct
  source 1..21: mol_type = other RNA
  modified_base <1: mod_base = OTHER; note = two inverted abasic nucleosides
  modified_base 1: mod_base = OTHER; note = 2'-O-methyl-adenosine
  modified_base 1^2: mod_base = OTHER; note = Phosphorothioate bond
  modified_base 2: mod_base = OTHER; note = 2'-O-methyl-adenosine
  modified_base 2^3: mod_base = OTHER; note = Phosphorothioate bond
  modified_base 3: mod_base = OTHER; note = 2'-O-methyl-adenosine
  modified_base 4: mod_base = cm
  modified_base 5: mod_base = um
  modified_base 6: mod_base = um
  modified_base 7: mod_base = gm
  modified_base 8: mod_base = OTHER; note = 2'-O-methyl-adenosine
  modified_base 9: mod_base = OTHER; note = 2'-Fluoro-adenosine
  modified_base 10: mod_base = OTHER; note = 2'-Fluoro-uridine
  modified_base 11: mod_base = OTHER; note = 2'-Fluoro-uridine
  modified_base 12: mod_base = um
  modified_base 13: mod_base = cm
  modified_base 14: mod_base = cm
  modified_base 15: mod_base = um
  modified_base 16: mod_base = OTHER; note = 2'-O-methyl-adenosine
  modified_base 17: mod_base = um
  modified_base 18: mod_base = gm
  modified_base 19: mod_base = um
  modified_base 20: mod_base = OTHER; note = 2'-O-methyl-adenosine
  modified_base 21: mod_base = um
aaacttgaatttcctatgtat

SEQ ID NO: 612 - RNA, 21 nt, synthetic construct
  source 1..21: mol_type = other RNA
  modified_base <1: mod_base = OTHER; note = two inverted abasic nucleosides
  modified_base 1: mod_base = cm
  modified_base 1^2: mod_base = OTHER; note = Phosphorothioate bond
  modified_base 2: mod_base = um
  modified_base 2^3: mod_base = OTHER; note = Phosphorothioate bond
  modified_base 3: mod_base = um
  modified_base 4: mod_base = gm
  modified_base 5: mod_base = OTHER; note = 2'-O-methyl-adenosine
  modified_base 6: mod_base = OTHER; note = 2'-O-methyl-adenosine
  modified_base 7: mod_base = OTHER; note = 2'-Fluoro-uridine
  modified_base 8: mod_base = um
  modified_base 9: mod_base = OTHER; note = 2'-Fluoro-uridine
  modified_base 10: mod_base = OTHER; note = 2'-Fluoro-cytidine
  modified_base 11: mod_base = OTHER; note = 2'-Fluoro-cytidine
  modified_base 12: mod_base = OTHER; note = 2'-Fluoro-uridine
  modified_base 13: mod_base = OTHER; note = 2'-O-methyl-adenosine
  modified_base 14: mod_base = um
  modified_base 15: mod_base = gm
  modified_base 16: mod_base = um
  modified_base 17: mod_base = OTHER; note = 2'-O-methyl-adenosine
  modified_base 18: mod_base = um
  modified_base 19: mod_base = um
  modified_base 20: mod_base = um
  modified_base 21: mod_base = um
cttgaatttcctatgtatttt

SEQ ID NO: 613 - RNA, 21 nt, synthetic construct
  source 1..21: mol_type = other RNA
  modified_base <1: mod_base = OTHER; note = two inverted abasic nucleosides
  modified_base 1: mod_base = cm
  modified_base 1^2: mod_base = OTHER; note = Phosphorothioate bond
  modified_base 2: mod_base = um
  modified_base 2^3: mod_base = OTHER; note = Phosphorothioate bond
  modified_base 3: mod_base = um
  modified_base 4: mod_base = gm
  modified_base 5: mod_base = OTHER; note = 2'-O-methyl-adenosine
  modified_base 6: mod_base = OTHER; note = 2'-O-methyl-adenosine
  modified_base 7: mod_base = um
  modified_base 8: mod_base = um
  modified_base 9: mod_base = OTHER; note = 2'-Fluoro-uridine
  modified_base 10: mod_base = OTHER; note = 2'-Fluoro-cytidine
  modified_base 11: mod_base = OTHER; note = 2'-Fluoro-cytidine
  modified_base 12: mod_base = um
  modified_base 13: mod_base = OTHER; note = 2'-O-methyl-adenosine
  modified_base 14: mod_base = um
  modified_base 15: mod_base = gm
  modified_base 16: mod_base = um
  modified_base 17: mod_base = OTHER; note = 2'-O-methyl-adenosine
  modified_base 18: mod_base = um
  modified_base 19: mod_base = um
  modified_base 20: mod_base = um
  modified_base 21: mod_base = um
cttgaatttcctatgtatttt

SEQ ID NO: 614 - RNA, 21 nt, synthetic construct
  source 1..21: mol_type = other RNA
  modified_base <1: mod_base = OTHER; note = two inverted abasic nucleosides
  modified_base 1: mod_base = cm
  modified_base 1^2: mod_base = OTHER; note = Phosphorothioate bond
  modified_base 2: mod_base = um
  modified_base 2^3: mod_base = OTHER; note = Phosphorothioate bond
  modified_base 3: mod_base = um
  modified_base 4: mod_base = um
  modified_base 5: mod_base = um
  modified_base 6: mod_base = cm
  modified_base 7: mod_base = OTHER; note = 2'-Fluoro-cytidine
  modified_base 8: mod_base = OTHER; note = 2'-O-methyl-adenosine
  modified_base 9: mod_base = OTHER; note = 2'-Fluoro-adenosine
  modified_base 10: mod_base = OTHER; note = 2'-Fluoro-adenosine
  modified_base 11: mod_base = OTHER; note = 2'-Fluoro-guanosine
  modified_base 12: mod_base = OTHER; note = 2'-Fluoro-uridine
  modified_base 13: mod_base = gm
  modified_base 14: mod_base = cm
  modified_base 15: mod_base = cm
  modified_base 16: mod_base = um
  modified_base 17: mod_base = um
  modified_base 18: mod_base = OTHER; note = 2'-O-methyl-adenosine
  modified_base 19: mod_base = OTHER; note = 2'-O-methyl-adenosine
  modified_base 20: mod_base = OTHER; note = 2'-O-methyl-adenosine
  modified_base 21: mod_base = OTHER; note = 2'-O-methyl-adenosine
cttttccaaagtgccttaaaa

SEQ ID NO: 615 - RNA, 21 nt, synthetic construct
  source 1..21: mol_type = other RNA
  modified_base <1: mod_base = OTHER; note = two inverted abasic nucleosides
  modified_base 1: mod_base = cm
  modified_base 1^2: mod_base = OTHER; note = Phosphorothioate bond
  modified_base 2: mod_base = um
  modified_base 2^3: mod_base = OTHER; note = Phosphorothioate bond
  modified_base 3: mod_base = um
  modified_base 4: mod_base = um
  modified_base 5: mod_base = um
  modified_base 6: mod_base = cm
  modified_base 7: mod_base = cm
  modified_base 8: mod_base = OTHER; note = 2'-O-methyl-adenosine
  modified_base 9: mod_base = OTHER; note = 2'-Fluoro-adenosine
  modified_base 10: mod_base = OTHER; note = 2'-Fluoro-adenosine
  modified_base 11: mod_base = OTHER; note = 2'-Fluoro-guanosine
  modified_base 12: mod_base = um
  modified_base 13: mod_base = gm
  modified_base 14: mod_base = cm
  modified_base 15: mod_base = cm
  modified_base 16: mod_base = um
  modified_base 17: mod_base = um
  modified_base 18: mod_base = OTHER; note = 2'-O-methyl-adenosine
  modified_base 19: mod_base = OTHER; note = 2'-O-methyl-adenosine
  modified_base 20: mod_base = OTHER; note = 2'-O-methyl-adenosine
  modified_base 21: mod_base = OTHER; note = 2'-O-methyl-adenosine
cttttccaaagtgccttaaaa

SEQ ID NO: 616 - RNA, 21 nt, synthetic construct
  source 1..21: mol_type = other RNA
  modified_base <1: mod_base = OTHER; note = two inverted abasic nucleosides
  modified_base 1: mod_base = cm
  modified_base 1^2: mod_base = OTHER; note = Phosphorothioate bond
  modified_base 2: mod_base = OTHER; note = 2'-O-methyl-adenosine
  modified_base 2^3: mod_base = OTHER; note = Phosphorothioate bond
  modified_base 3: mod_base = gm
  modified_base 4: mod_base = um
  modified_base 5: mod_base = OTHER; note = 2'-O-methyl-adenosine
  modified_base 6: mod_base = um
  modified_base 7: mod_base = OTHER; note = 2'-Fluoro-uridine
  modified_base 8: mod_base = um
  modified_base 9: mod_base = OTHER; note = 2'-Fluoro-uridine
  modified_base 10: mod_base = OTHER; note = 2'-Fluoro-guanosine
  modified_base 11: mod_base = OTHER; note = 2'-Fluoro-guanosine
  modified_base 12: mod_base = OTHER; note = 2'-Fluoro-adenosine
  modified_base 13: mod_base = gm
  modified_base 14: mod_base = gm
  modified_base 15: mod_base = um
  modified_base 16: mod_base = gm
  modified_base 17: mod_base = um
  modified_base 18: mod_base = cm
  modified_base 19: mod_base = um
  modified_base 20: mod_base = cm
  modified_base 21: mod_base = um
cagtattttggaggtgtctct

SEQ ID NO: 617 - RNA, 21 nt, synthetic construct
  source 1..21: mol_type = other RNA
  modified_base <1: mod_base = OTHER; note = two inverted abasic nucleosides
  modified_base 1: mod_base = cm
  modified_base 1^2: mod_base = OTHER; note = Phosphorothioate bond
  modified_base 2: mod_base = OTHER; note = 2'-O-methyl-adenosine
  modified_base 2^3: mod_base = OTHER; note = Phosphorothioate bond
  modified_base 3: mod_base = gm
  modified_base 4: mod_base = um
  modified_base 5: mod_base = OTHER; note = 2'-O-methyl-adenosine
  modified_base 6: mod_base = um
  modified_base 7: mod_base = um
  modified_base 8: mod_base = um
  modified_base 9: mod_base = OTHER; note = 2'-Fluoro-uridine
  modified_base 10: mod_base = OTHER; note = 2'-Fluoro-guanosine
  modified_base 11: mod_base = OTHER; note = 2'-Fluoro-guanosine
  modified_base 12: mod_base = OTHER; note = 2'-O-methyl-adenosine
  modified_base 13: mod_base = gm
  modified_base 14: mod_base = gm
  modified_base 15: mod_base = um
  modified_base 16: mod_base = gm
  modified_base 17: mod_base = um
  modified_base 18: mod_base = cm
  modified_base 19: mod_base = um
  modified_base 20: mod_base = cm
  modified_base 21: mod_base = um
cagtattttggaggtgtctct

SEQ ID NO: 618 - RNA, 21 nt, synthetic construct
  source 1..21: mol_type = other RNA
  modified_base 1: mod_base = OTHER; note = 2'-O-methyl-adenosine
  modified_base 1^2: mod_base = OTHER; note = Phosphorothioate bond
  modified_base 2: mod_base = OTHER; note = 2'-O-methyl-adenosine
  modified_base 2^3: mod_base = OTHER; note = Phosphorothioate bond
  modified_base 3: mod_base = cm
  modified_base 4: mod_base = um
  modified_base 5: mod_base = um
  modified_base 6: mod_base = gm
  modified_base 7: mod_base = OTHER; note = 2'-Fluoro-adenosine
  modified_base 8: mod_base = OTHER; note = 2'-O-methyl-adenosine
  modified_base 9: mod_base = OTHER; note = 2'-Fluoro-uridine
  modified_base 10: mod_base = OTHER; note = 2'-Fluoro-uridine
  modified_base 11: mod_base = OTHER; note = 2'-Fluoro-uridine
  modified_base 12: mod_base = cm
  modified_base 13: mod_base = cm
  modified_base 14: mod_base = um
  modified_base 15: mod_base = OTHER; note = 2'-O-methyl-adenosine
  modified_base 16: mod_base = um
  modified_base 17: mod_base = gm
  modified_base 18: mod_base = um
  modified_base 19: mod_base = OTHER; note = 2'-O-methyl-adenosine
  modified_base 20: mod_base = um
  modified_base 21: mod_base = um
aacttgaatttcctatgtatt

SEQ ID NO: 619 - RNA, 21 nt, synthetic construct
  source 1..21: mol_type = other RNA
  modified_base 1: mod_base = um
  modified_base 1^2: mod_base = OTHER; note = Phosphorothioate bond
  modified_base 2: mod_base = cm
  modified_base 2^3: mod_base = OTHER; note = Phosphorothioate bond
  modified_base 3: mod_base = OTHER; note = 2'-O-methyl-adenosine
  modified_base 4: mod_base = OTHER; note = 2'-O-methyl-adenosine
  modified_base 5: mod_base = um
  modified_base 6: mod_base = gm
  modified_base 7: mod_base = OTHER; note = 2'-Fluoro-guanosine
  modified_base 8: mod_base = OTHER; note = 2'-O-methyl-adenosine
  modified_base 9: mod_base = OTHER; note = 2'-Fluoro-uridine
  modified_base 10: mod_base = OTHER; note = 2'-Fluoro-uridine
  modified_base 11: mod_base = OTHER; note = 2'-Fluoro-uridine
  modified_base 12: mod_base = cm
  modified_base 13: mod_base = cm
  modified_base 14: mod_base = um
  modified_base 15: mod_base = OTHER; note = 2'-O-methyl-adenosine
  modified_base 16: mod_base = OTHER; note = 2'-O-methyl-adenosine
  modified_base 17: mod_base = um
  modified_base 18: mod_base = OTHER; note = 2'-O-methyl-adenosine
  modified_base 19: mod_base = OTHER; note = 2'-O-methyl-adenosine
  modified_base 20: mod_base = um
  modified_base 21: mod_base = um
tcaatggatttcctaataatt

SEQ ID NO: 620 - RNA, 21 nt, synthetic construct
  source 1..21: mol_type = other RNA
  modified_base 1: mod_base = gm
  modified_base 1^2: mod_base = OTHER; note = Phosphorothioate bond
  modified_base 2: mod_base = um
  modified_base 2^3: mod_base = OTHER; note = Phosphorothioate bond
  modified_base 3: mod_base = um
  modified_base 4: mod_base = cm
  modified_base 5: mod_base = OTHER; note = 2'-O-methyl-adenosine
  modified_base 6: mod_base = gm
  modified_base 7: mod_base = OTHER; note = 2'-Fluoro-uridine
  modified_base 8: mod_base = OTHER; note = 2'-O-methyl-adenosine
  modified_base 9: mod_base = OTHER; note = 2'-Fluoro-uridine
  modified_base 10: mod_base = OTHER; note = 2'-Fluoro-uridine
  modified_base 11: mod_base = OTHER; note = 2'-Fluoro-uridine
  modified_base 12: mod_base = um
  modified_base 13: mod_base = gm
  modified_base 14: mod_base = gm
  modified_base 15: mod_base = OTHER; note = 2'-O-methyl-adenosine
  modified_base 16: mod_base = gm
  modified_base 17: mod_base = gm
  modified_base 18: mod_base = um
  modified_base 19: mod_base = gm
  modified_base 20: mod_base = um
  modified_base 21: mod_base = cm
gttcagtattttggaggtgtc

SEQ ID NO: 621 - RNA, 21 nt, synthetic construct
  source 1..21: mol_type = other RNA
  modified_base 1: mod_base = OTHER; note = 2'-O-methyl-adenosine
  modified_base 1^2: mod_base = OTHER; note = Phosphorothioate bond
  modified_base 2: mod_base = OTHER; note = 2'-O-methyl-adenosine
  modified_base 2^3: mod_base = OTHER; note = Phosphorothioate bond
  modified_base 3: mod_base = um
  modified_base 4: mod_base = gm
  modified_base 5: mod_base = gm
  modified_base 6: mod_base = OTHER; note = 2'-O-methyl-adenosine
  modified_base 7: mod_base = OTHER; note = 2'-Fluoro-uridine
  modified_base 8: mod_base = um
  modified_base 9: mod_base = OTHER; note = 2'-Fluoro-uridine
  modified_base 10: mod_base = OTHER; note = 2'-Fluoro-cytidine
  modified_base 11: mod_base = OTHER; note = 2'-Fluoro-cytidine
  modified_base 12: mod_base = um
  modified_base 13: mod_base = OTHER; note = 2'-O-methyl-adenosine
  modified_base 14: mod_base = OTHER; note = 2'-O-methyl-adenosine
  modified_base 15: mod_base = um
  modified_base 16: mod_base = OTHER; note = 2'-O-methyl-adenosine
  modified_base 17: mod_base = OTHER; note = 2'-O-methyl-adenosine
  modified_base 18: mod_base = um
  modified_base 19: mod_base = um
  modified_base 20: mod_base = OTHER; note = 2'-O-methyl-adenosine
  modified_base 21: mod_base = um
aatggatttcctaataattat

SEQ ID NO: 622 - RNA, 23 nt, Homo sapiens
  source 1..23: mol_type = mRNA
caatggataagtttggattcagc

SEQ ID NO: 623 - RNA, 23 nt, Homo sapiens
  source 1..23: mol_type = mRNA
tttggtagttgtaatttaacaga

SEQ ID NO: 624 - RNA, 23 nt, Homo sapiens
  source 1..23: mol_type = mRNA
aataacagcagtcaggttgttta

SEQ ID NO: 625 - RNA, 23 nt, Homo sapiens
  source 1..23: mol_type = mRNA
gattgtctgatttctgaatgtaa

SEQ ID NO: 626 - RNA, 23 nt, Homo sapiens
  source 1..23: mol_type = mRNA
tggtgttcaaaacagaactgtat

SEQ ID NO: 627 - RNA, 23 nt, Homo sapiens
  source 1..23: mol_type = mRNA
tcagatgctaacttggttctttt

SEQ ID NO: 628 - RNA, 23 nt, Homo sapiens
  source 1..23: mol_type = mRNA
gcatctcagatgctaacttggtt

SEQ ID NO: 629 - RNA, 23 nt, Homo sapiens
  source 1..23: mol_type = mRNA
attgtctgatttctgaatgtaaa

SEQ ID NO: 630 - RNA, 23 nt, Homo sapiens
  source 1..23: mol_type = mRNA
ctcagatgctaacttggttcttt

SEQ ID NO: 631 - RNA, 23 nt, Homo sapiens
  source 1..23: mol_type = mRNA
ggtagttgtaatttaacagaaaa

SEQ ID NO: 632 - RNA, 23 nt, Homo sapiens
  source 1..23: mol_type = mRNA
cagattgtctgatttctgaatgt

SEQ ID NO: 633 - RNA, 23 nt, Homo sapiens
  source 1..23: mol_type = mRNA
aatttcaaccattcttaatgtta

SEQ ID NO: 634 - RNA, 23 nt, Homo sapiens
  source 1..23: mol_type = mRNA
gtaaataacagcagtcaggttgt

SEQ ID NO: 635 - RNA, 23 nt, Homo sapiens
  source 1..23: mol_type = mRNA
tctcagatgctaacttggttctt

SEQ ID NO: 636 - RNA, 23 nt, Homo sapiens
  source 1..23: mol_type = mRNA
tgctctctgatggtttgaactca

SEQ ID NO: 637 - RNA, 23 nt, Homo sapiens
  source 1..23: mol_type = mRNA
catagctgtttaatgttaagtca

SEQ ID NO: 638 - RNA, 23 nt, Homo sapiens
  source 1..23: mol_type = mRNA
taccttatgttcagtattttgga

SEQ ID NO: 639 - RNA, 23 nt, Homo sapiens
  source 1..23: mol_type = mRNA
tcttatctgtgcctttactgctt

SEQ ID NO: 640 - RNA, 23 nt, Homo sapiens
  source 1..23: mol_type = mRNA
cttagcaaaaggattttaaaact

SEQ ID NO: 641 - RNA, 23 nt, Homo sapiens
  source 1..23: mol_type = mRNA
catctcagatgctaacttggttc

SEQ ID NO: 642 - RNA, 23 nt, Homo sapiens
  source 1..23: mol_type = mRNA
caatcactgtgcatatgtctttt

SEQ ID NO: 643 - RNA, 23 nt, Homo sapiens
  source 1..23: mol_type = mRNA
tgatccaaatttgcatagctgtt

SEQ ID NO: 644 - RNA, 23 nt, Homo sapiens
  source 1..23: mol_type = mRNA
ggagagtgctgctaaaattggat

SEQ ID NO: 645 - RNA, 23 nt, Homo sapiens
  source 1..23: mol_type = mRNA
tgttgatccaaatttgcatagct

SEQ ID NO: 646 - RNA, 23 nt, Homo sapiens
  source 1..23: mol_type = mRNA
ttggtgttcaaaacagaactgta

SEQ ID NO: 647 - RNA, 23 nt, Homo sapiens
  source 1..23: mol_type = mRNA
agctgtttaatgttaagtcatga

SEQ ID NO: 648 - RNA, 23 nt, Homo sapiens
  source 1..23: mol_type = mRNA
tcctgttccacctcaggttttca

SEQ ID NO: 649 - RNA, 23 nt, Homo sapiens
  source 1..23: mol_type = mRNA
atttcaaccattcttaatgttac

SEQ ID NO: 650 - RNA, 23 nt, Homo sapiens
  source 1..23: mol_type = mRNA
tctccagattgtctgatttctga

SEQ ID NO: 651 - RNA, 23 nt, Homo sapiens
  source 1..23: mol_type = mRNA
atctcagatgctaacttggttct

SEQ ID NO: 652 - RNA, 23 nt, Homo sapiens
  source 1..23: mol_type = mRNA
cagcctaccttatgttcagtatt

SEQ ID NO: 653 - RNA, 23 nt, Homo sapiens
  source 1..23: mol_type = mRNA
ctgtttaatgttaagtcatgaca

SEQ ID NO: 654 - RNA, 23 nt, Homo sapiens
  source 1..23: mol_type = mRNA
aatttgcatagctgtttaatgtt

SEQ ID NO: 655 - RNA, 23 nt, Homo sapiens
  source 1..23: mol_type = mRNA
tccagattgtctgatttctgaat

SEQ ID NO: 656 - RNA, 23 nt, Homo sapiens
  source 1..23: mol_type = mRNA
attatgatctagcttgattttgt

SEQ ID NO: 657 - RNA, 23 nt, Homo sapiens
  source 1..23: mol_type = mRNA
ttgatccaaatttgcatagctgt

SEQ ID NO: 658 - RNA, 23 nt, Homo sapiens
  source 1..23: mol_type = mRNA
agattgtctgatttctgaatgta

SEQ ID NO: 659 - RNA, 23 nt, Homo sapiens
  source 1..23: mol_type = mRNA
tttgcatagctgtttaatgttaa

SEQ ID NO: 660 - RNA, 23 nt, Homo sapiens
  source 1..23: mol_type = mRNA
tctaattatgatctagcttgatt

SEQ ID NO: 661 - RNA, 23 nt, Homo sapiens
  source 1..23: mol_type = mRNA
ataacagcagtcaggttgtttac

SEQ ID NO: 662 - RNA, 23 nt, Homo sapiens
  source 1..23: mol_type = mRNA
ctccagattgtctgatttctgaa

SEQ ID NO: 663 - RNA, 23 nt, Homo sapiens
  source 1..23: mol_type = mRNA
tgcatagctgtttaatgttaagt

SEQ ID NO: 664 - RNA, 23 nt, Homo sapiens
  source 1..23: mol_type = mRNA
ctaattatgatctagcttgattt

SEQ ID NO: 665 - RNA, 23 nt, Homo sapiens
  source 1..23: mol_type = mRNA
cctaccttatgttcagtattttg

SEQ ID NO: 666 - RNA, 23 nt, Homo sapiens
  source 1..23: mol_type = mRNA
agtattttggaggtgtctctgct

SEQ ID NO: 667 - RNA, 23 nt, Homo sapiens
  source 1..23: mol_type = mRNA
ctgacttttccaaagtgccttaa

SEQ ID NO: 668 - RNA, 23 nt, Homo sapiens
  source 1..23: mol_type = mRNA
tcagtattttggaggtgtctctg

SEQ ID NO: 669 - RNA, 23 nt, Homo sapiens
  source 1..23: mol_type = mRNA
tgacttttccaaagtgccttaaa

SEQ ID NO: 670 - RNA, 23 nt, Homo sapiens
  source 1..23: mol_type = mRNA
cagtattttggaggtgtctctgc

SEQ ID NO: 671 - RNA, 23 nt, Homo sapiens
  source 1..23: mol_type = mRNA
ccaaatcacagtggacatcggga

SEQ ID NO: 672 - RNA, 23 nt, Homo sapiens
  source 1..23: mol_type = mRNA
aaatcacagtggacatcgggaca

SEQ ID NO: 673 - RNA, 23 nt, Homo sapiens
  source 1..23: mol_type = mRNA
tgccctgaggagtccccgctgct

SEQ ID NO: 674 - RNA, 23 nt, Homo sapiens
  source 1..23: mol_type = mRNA
cagcgggcctgccgcctgctcgt

SEQ ID NO: 675 - RNA, 23 nt, Homo sapiens
  source 1..23: mol_type = mRNA
tacccaaatcacagtggacatcg

SEQ ID NO: 676 - RNA, 23 nt, Homo sapiens
  source 1..23: mol_type = mRNA
cccaaatcacagtggacatcggg

SEQ ID NO: 677 - RNA, 23 nt, Homo sapiens
  source 1..23: mol_type = mRNA
cacagtggacatcgggacaccga

SEQ ID NO: 678 - RNA, 23 nt, Homo sapiens
  source 1..23: mol_type = mRNA
cccaatcctcagaggtttgaccg

SEQ ID NO: 679 - RNA, 23 nt, Homo sapiens
  source 1..23: mol_type = mRNA
gcgggcctgccgcctgctcgtgg

SEQ ID NO: 680 - RNA, 23 nt, Homo sapiens
  source 1..23: mol_type = mRNA
agcgggcctgccgcctgctcgtg

SEQ ID NO: 681 - RNA, 23 nt, synthetic construct
  source 1..23: mol_type = other RNA
gctgaatccaaacttatccattg

SEQ ID NO: 682 - RNA, 23 nt, synthetic construct
  source 1..23: mol_type = other RNA
tctgttaaattacaactaccaaa

SEQ ID NO: 683 - RNA, 23 nt, synthetic construct
  source 1..23: mol_type = other RNA
taaacaacctgactgctgttatt

SEQ ID NO: 684 - RNA, 23 nt, synthetic construct
  source 1..23: mol_type = other RNA
ttacattcagaaatcagacaatc

SEQ ID NO: 685 - RNA, 23 nt, synthetic construct
  source 1..23: mol_type = other RNA
atacagttctgttttgaacacca

SEQ ID NO: 686 - RNA, 23 nt, synthetic construct
  source 1..23: mol_type = other RNA
aaaagaaccaagttagcatctga

SEQ ID NO: 687 - RNA, 23 nt, synthetic construct
  source 1..23: mol_type = other RNA
aaccaagttagcatctgagatgc

SEQ ID NO: 688 - RNA, 23 nt, synthetic construct
  source 1..23: mol_type = other RNA
tttacattcagaaatcagacaat

SEQ ID NO: 689 - RNA, 23 nt, synthetic construct
  source 1..23: mol_type = other RNA
aaagaaccaagttagcatctgag

SEQ ID NO: 690 - RNA, 23 nt, synthetic construct
  source 1..23: mol_type = other RNA
ttttctgttaaattacaactacc

SEQ ID NO: 691 - RNA, 23 nt, synthetic construct
  source 1..23: mol_type = other RNA
acattcagaaatcagacaatctg

SEQ ID NO: 692 - RNA, 23 nt, synthetic construct
  source 1..23: mol_type = other RNA
taacattaagaatggttgaaatt

SEQ ID NO: 693 - RNA, 23 nt, synthetic construct
  source 1..23: mol_type = other RNA
acaacctgactgctgttatttac

SEQ ID NO: 694 - RNA, 23 nt, synthetic construct
  source 1..23: mol_type = other RNA
aagaaccaagttagcatctgaga

SEQ ID NO: 695 - RNA, 23 nt, synthetic construct
  source 1..23: mol_type = other RNA
tgagttcaaaccatcagagagca

SEQ ID NO: 696 - RNA, 23 nt, synthetic construct
  source 1..23: mol_type = other RNA
tgacttaacattaaacagctatg

SEQ ID NO: 697 - RNA, 23 nt, synthetic construct
  source 1..23: mol_type = other RNA
tccaaaatactgaacataaggta

SEQ ID NO: 698 - RNA, 23 nt, synthetic construct
  source 1..23: mol_type = other RNA
aagcagtaaaggcacagataaga

SEQ ID NO: 699 - RNA, 23 nt, synthetic construct
  source 1..23: mol_type = other RNA
agttttaaaatccttttgctaag

SEQ ID NO: 700 - RNA, 23 nt, synthetic construct
  source 1..23: mol_type = other RNA
gaaccaagttagcatctgagatg

SEQ ID NO: 701 - RNA, 23 nt, synthetic construct
  source 1..23: mol_type = other RNA
aaaagacatatgcacagtgattg

SEQ ID NO: 702 - RNA, 23 nt, synthetic construct
  source 1..23: mol_type = other RNA
aacagctatgcaaatttggatca

SEQ ID NO: 703 - RNA, 23 nt, synthetic construct
  source 1..23: mol_type = other RNA
atccaattttagcagcactctcc

SEQ ID NO: 704 - RNA, 23 nt, synthetic construct
  source 1..23: mol_type = other RNA
agctatgcaaatttggatcaaca

SEQ ID NO: 705 - RNA, 23 nt, synthetic construct
  source 1..23: mol_type = other RNA
tacagttctgttttgaacaccaa

SEQ ID NO: 706 - RNA, 23 nt, synthetic construct
  source 1..23: mol_type = other RNA
tcatgacttaacattaaacagct

SEQ ID NO: 707 - RNA, 23 nt, synthetic construct
  source 1..23: mol_type = other RNA
tgaaaacctgaggtggaacagga

SEQ ID NO: 708 - RNA, 23 nt, synthetic construct
  source 1..23: mol_type = other RNA
gtaacattaagaatggttgaaat

SEQ ID NO: 709 - RNA, 23 nt, synthetic construct
  source 1..23: mol_type = other RNA
tcagaaatcagacaatctggaga

SEQ ID NO: 710 - RNA, 23 nt, synthetic construct
  source 1..23: mol_type = other RNA
agaaccaagttagcatctgagat

SEQ ID NO: 711 - RNA, 23 nt, synthetic construct
  source 1..23: mol_type = other RNA
aatactgaacataaggtaggctg

SEQ ID NO: 712 - RNA, 23 nt, synthetic construct
  source 1..23: mol_type = other RNA
tgtcatgacttaacattaaacag

SEQ ID NO: 713 - RNA, 23 nt, synthetic construct
  source 1..23: mol_type = other RNA
aacattaaacagctatgcaaatt

SEQ ID NO: 714 - RNA, 23 nt, synthetic construct
  source 1..23: mol_type = other RNA
attcagaaatcagacaatctgga

SEQ ID NO: 715 - RNA, 23 nt, synthetic construct
  source 1..23: mol_type = other RNA
acaaaatcaagctagatcataat

SEQ ID NO: 716 - RNA, 23 nt, synthetic construct
  source 1..23: mol_type = other RNA
acagctatgcaaatttggatcaa

SEQ ID NO: 717 - RNA, 23 nt, synthetic construct
  source 1..23: mol_type = other RNA
tacattcagaaatcagacaatct

SEQ ID NO: 718 - RNA, 23 nt, synthetic construct
  source 1..23: mol_type = other RNA
ttaacattaaacagctatgcaaa

SEQ ID NO: 719 - RNA, 23 nt, synthetic construct
  source 1..23: mol_type = other RNA
aatcaagctagatcataattaga

SEQ ID NO: 720 - RNA, 23 nt, synthetic construct
  source 1..23: mol_type = other RNA
gtaaacaacctgactgctgttat

SEQ ID NO: 721 - RNA, 23 nt, synthetic construct
  source 1..23: mol_type = other RNA
ttcagaaatcagacaatctggag

SEQ ID NO: 722 - RNA, 23 nt, synthetic construct
  source 1..23: mol_type = other RNA
acttaacattaaacagctatgca

SEQ ID NO: 723 - RNA, 23 nt, synthetic construct
  source 1..23: mol_type = other RNA
aaatcaagctagatcataattag

SEQ ID NO: 724 - RNA, 23 nt, synthetic construct
  source 1..23: mol_type = other RNA
caaaatactgaacataaggtagg

SEQ ID NO: 725 - RNA, 23 nt, synthetic construct
  source 1..23: mol_type = other RNA
agcagagacacctccaaaatact

SEQ ID NO: 726 - RNA, 23 nt, synthetic construct
  source 1..23: mol_type = other RNA
ttaaggcactttggaaaagtcag

SEQ ID NO: 727 - RNA, 23 nt, synthetic construct
  source 1..23: mol_type = other RNA
cagagacacctccaaaatactga

SEQ ID NO: 728 - RNA, 23 nt, synthetic construct
  source 1..23: mol_type = other RNA
tttaaggcactttggaaaagtca

SEQ ID NO: 729 - RNA, 23 nt, synthetic construct
  source 1..23: mol_type = other RNA
gcagagacacctccaaaatactg

SEQ ID NO: 730 - RNA, 23 nt, synthetic construct
  source 1..23: mol_type = other RNA
tcccgatgtccactgtgatttgg

SEQ ID NO: 731 - RNA, 23 nt, synthetic construct
  source 1..23: mol_type = other RNA
tgtcccgatgtccactgtgattt

SEQ ID NO: 732 - RNA, 23 nt, synthetic construct
  source 1..23: mol_type = other RNA
agcagcggggactcctcagggca

SEQ ID NO: 733 - RNA, 23 nt, synthetic construct
  source 1..23: mol_type = other RNA
acgagcaggcggcaggcccgctg

SEQ ID NO: 734 - RNA, 23 nt, synthetic construct
  source 1..23: mol_type = other RNA
cgatgtccactgtgatttgggta

SEQ ID NO: 735 - RNA, 23 nt, synthetic construct
  source 1..23: mol_type = other RNA
cccgatgtccactgtgatttggg

SEQ ID NO: 736 - RNA, 23 nt, synthetic construct
  source 1..23: mol_type = other RNA
tcggtgtcccgatgtccactgtg

SEQ ID NO: 737 - RNA, 23 nt, synthetic construct
  source 1..23: mol_type = other RNA
cggtcaaacctctgaggattggg

SEQ ID NO: 738 - RNA, 23 nt, synthetic construct
  source 1..23: mol_type = other RNA
ccacgagcaggcggcaggcccgc

SEQ ID NO: 739 - RNA, 23 nt, synthetic construct
  source 1..23: mol_type = other RNA
cacgagcaggcggcaggcccgct

SEQ ID NO: 740 - RNA, 21 nt, synthetic construct
  source 1..21: mol_type = other RNA
atggataagtttggattcagc

SEQ ID NO: 741 - RNA, 21 nt, synthetic construct
  source 1..21: mol_type = other RNA
tggtagttgtaatttaacaga

SEQ ID NO: 742 - RNA, 21 nt, synthetic construct
  source 1..21: mol_type = other RNA
taacagcagtcaggttgttta

SEQ ID NO: 743 - RNA, 21 nt, synthetic construct
  source 1..21: mol_type = other RNA
ttgtctgatttctgaatgtaa

SEQ ID NO: 744 - RNA, 21 nt, synthetic construct
  source 1..21: mol_type = other RNA
gtgttcaaaacagaactgtat

SEQ ID NO: 745 - RNA, 21 nt, synthetic construct
  source 1..21: mol_type = other RNA
agatgctaacttggttctttt

SEQ ID NO: 746 - RNA, 21 nt, synthetic construct
  source 1..21: mol_type = other RNA
atctcagatgctaacttggtt

SEQ ID NO: 747 - RNA, 21 nt, synthetic construct
  source 1..21: mol_type = other RNA
tgtctgatttctgaatgtaaa

SEQ ID NO: 748 - RNA, 21 nt, synthetic construct
  source 1..21: mol_type = other RNA
cagatgctaacttggttcttt

SEQ ID NO: 749 - RNA, 21 nt, synthetic construct
  source 1..21: mol_type = other RNA
tagttgtaatttaacagaaaa

SEQ ID NO: 750 - RNA, 21 nt, synthetic construct
  source 1..21: mol_type = other RNA
gattgtctgatttctgaatgt

SEQ ID NO: 751 - RNA, 21 nt, synthetic construct
  source 1..21: mol_type = other RNA
tttcaaccattcttaatgtta

SEQ ID NO: 752 - RNA, 21 nt, synthetic construct
  source 1..21: mol_type = other RNA
aaataacagcagtcaggttgt

SEQ ID NO: 753 - RNA, 21 nt, synthetic construct
  source 1..21: mol_type = other RNA
tcagatgctaacttggttctt

SEQ ID NO: 754 - RNA, 21 nt, synthetic construct
  source 1..21: mol_type = other RNA
ctctctgatggtttgaactca

SEQ ID NO: 755 - RNA, 21 nt, synthetic construct
  source 1..21: mol_type = other RNA
tagctgtttaatgttaagtca

SEQ ID NO: 756 - RNA, 21 nt, synthetic construct
  source 1..21: mol_type = other RNA
ccttatgttcagtattttgga

SEQ ID NO: 757 - RNA, 21 nt, synthetic construct
  source 1..21: mol_type = other RNA
ttatctgtgcctttactgctt

SEQ ID NO: 758 - RNA, 21 nt, synthetic construct
  source 1..21: mol_type = other RNA
tagcaaaaggattttaaaact

SEQ ID NO: 759 - RNA, 21 nt, synthetic construct
  source 1..21: mol_type = other RNA
tctcagatgctaacttggttc

SEQ ID NO: 760 - RNA, 21 nt, synthetic construct
  source 1..21: mol_type = other RNA
atcactgtgcatatgtctttt

SEQ ID NO: 761 - RNA, 21 nt, synthetic construct
  source 1..21: mol_type = other RNA
atccaaatttgcatagctgtt

SEQ ID NO: 762 - RNA, 21 nt, synthetic construct
  source 1..21: mol_type = other RNA
agagtgctgctaaaattggat

SEQ ID NO: 763 - RNA, 21 nt, synthetic construct
  source 1..21: mol_type = other RNA
ttgatccaaatttgcatagct

SEQ ID NO: 764 - RNA, 21 nt, synthetic construct
  source 1..21: mol_type = other RNA
ggtgttcaaaacagaactgta

SEQ ID NO: 765 - RNA, 21 nt, synthetic construct
  source 1..21: mol_type = other RNA
ctgtttaatgttaagtcatga

SEQ ID NO: 766 - RNA, 21 nt, synthetic construct
  source 1..21: mol_type = other RNA
ctgttccacctcaggttttca

SEQ ID NO: 767 - RNA, 21 nt, synthetic construct
  source 1..21: mol_type = other RNA
ttcaaccattcttaatgttac

SEQ ID NO: 768 - RNA, 21 nt, synthetic construct
  source 1..21: mol_type = other RNA
tccagattgtctgatttctga

SEQ ID NO: 769 - RNA, 21 nt, synthetic construct
  source 1..21: mol_type = other RNA
ctcagatgctaacttggttct

SEQ ID NO: 770 - RNA, 21 nt, synthetic construct
  source 1..21: mol_type = other RNA
gcctaccttatgttcagtatt

SEQ ID NO: 771 - RNA, 21 nt, synthetic construct
  source 1..21: mol_type = other RNA
gtttaatgttaagtcatgaca

SEQ ID NO: 772 - RNA, 21 nt, synthetic construct
  source 1..21: mol_type = other RNA
tttgcatagctgtttaatgtt

SEQ ID NO: 773 - RNA, 21 nt, synthetic construct
  source 1..21: mol_type = other RNA
cagattgtctgatttctgaat

SEQ ID NO: 774 - RNA, 21 nt, synthetic construct
  source 1..21: mol_type = other RNA
tatgatctagcttgattttgt

SEQ ID NO: 775 - RNA, 21 nt, synthetic construct
  source 1..21: mol_type = other RNA
gatccaaatttgcatagctgt

SEQ ID NO: 776 - RNA, 21 nt, synthetic construct
  source 1..21: mol_type = other RNA
attgtctgatttctgaatgta

SEQ ID NO: 777 - RNA, 21 nt, synthetic construct
  source 1..21: mol_type = other RNA
tgcatagctgtttaatgttaa

SEQ ID NO: 778 - RNA, 21 nt, synthetic construct
  source 1..21: mol_type = other RNA
taattatgatctagcttgatt

SEQ ID NO: 779 - RNA, 21 nt, synthetic construct
  source 1..21: mol_type = other RNA
aacagcagtcaggttgtttac

SEQ ID NO: 780 - RNA, 21 nt, synthetic construct
  source 1..21: mol_type = other RNA
ccagattgtctgatttctgaa

SEQ ID NO: 781 - RNA, 21 nt, synthetic construct
  source 1..21: mol_type = other RNA
catagctgtttaatgttaagt

SEQ ID NO: 782 - RNA, 21 nt, synthetic construct
  source 1..21: mol_type = other RNA
aattatgatctagcttgattt

SEQ ID NO: 783 - RNA, 21 nt, synthetic construct
  source 1..21: mol_type = other RNA
taccttatgttcagtattttg

SEQ ID NO: 784 - RNA, 21 nt, synthetic construct
  source 1..21: mol_type = other RNA
tattttggaggtgtctctgct

SEQ ID NO: 785 - RNA, 21 nt, synthetic construct
  source 1..21: mol_type = other RNA
gacttttccaaagtgccttaa

SEQ ID NO: 786 - RNA, 21 nt, synthetic construct
  source 1..21: mol_type = other RNA
agtattttggaggtgtctctg

SEQ ID NO: 787 - RNA, 21 nt, synthetic construct
  source 1..21: mol_type = other RNA
acttttccaaagtgccttaaa

SEQ ID NO: 788 - RNA, 21 nt, synthetic construct
  source 1..21: mol_type = other RNA
gtattttggaggtgtctctgc

SEQ ID NO: 789 - RNA, 21 nt, synthetic construct
  source 1..21: mol_type = other RNA
aaatcacagtggacatcggga

SEQ ID NO: 790 - RNA, 21 nt, synthetic construct
  source 1..21: mol_type = other RNA
atcacagtggacatcgggaca

SEQ ID NO: 791 - RNA, 21 nt, synthetic construct
  source 1..21: mol_type = other RNA
ccctgaggagtccccgctgct

SEQ ID NO: 792 - RNA, 21 nt, synthetic construct
  source 1..21: mol_type = other RNA
gcgggcctgccgcctgctcgt

SEQ ID NO: 793 - RNA, 21 nt, synthetic construct
  source 1..21: mol_type = other RNA
cccaaatcacagtggacatcg

SEQ ID NO: 794 - RNA, 21 nt, synthetic construct
  source 1..21: mol_type = other RNA
caaatcacagtggacatcggg

SEQ ID NO: 795 - RNA, 21 nt, synthetic construct
  source 1..21: mol_type = other RNA
cagtggacatcgggacaccga

SEQ ID NO: 796 - RNA, 21 nt, synthetic construct
  source 1..21: mol_type = other RNA
caatcctcagaggtttgaccg

SEQ ID NO: 797 - RNA, 21 nt, synthetic construct
  source 1..21: mol_type = other RNA
gggcctgccgcctgctcgtgg

SEQ ID NO: 798 - RNA, 21 nt, synthetic construct
  source 1..21: mol_type = other RNA
cgggcctgccgcctgctcgtg

SEQ ID NO: 799 - RNA, 23 nt, synthetic construct
  source 1..23: mol_type = other RNA
  modified_base 1: mod_base = OTHER; note = 2'-O-methyl-adenosine
  modified_base 1^2: mod_base = OTHER; note = Phosphorothioate bond
  modified_base 2: mod_base = OTHER; note = 2'-Fluoro-uridine
  modified_base 2^3: mod_base = OTHER; note = Phosphorothioate bond
  modified_base 3: mod_base = OTHER; note = 2'-O-methyl-adenosine
  modified_base 4: mod_base = cm
  modified_base 5: mod_base = OTHER; note = 2'-O-methyl-adenosine
  modified_base 6: mod_base = OTHER; note = 2'-Fluoro-uridine
  modified_base 7: mod_base = OTHER; note = 2'-O-methyl-adenosine
  modified_base 8: mod_base = gm
  modified_base 9: mod_base = gm
  modified_base 10: mod_base = OTHER; note = 2'-O-methyl-adenosine
  modified_base 11: mod_base = OTHER; note = 2'-O-methyl-adenosine
  modified_base 12: mod_base = OTHER; note = 2'-O-methyl-adenosine
  modified_base 13: mod_base = um
  modified_base 14: mod_base = OTHER; note = 2'-Fluoro-uridine
  modified_base 15: mod_base = cm
  modified_base 16: mod_base = OTHER; note = 2'-Fluoro-adenosine
  modified_base 17: mod_base = OTHER; note = 2'-O-methyl-adenosine
  modified_base 18: mod_base = OTHER; note = 2'-Fluoro-guanosine
  modified_base 19: mod_base = um
  modified_base 20: mod_base = um
  modified_base 21: mod_base = um
  modified_base 21^22: mod_base = OTHER; note = Phosphorothioate bond
  modified_base 22: mod_base = OTHER; note = 2'-O-methyl-adenosine
  modified_base 22^23: mod_base = OTHER; note = Phosphorothioate bond
  modified_base 23: mod_base = cm
atacataggaaattcaagtttac

SEQ ID NO: 800 - RNA, 23 nt, synthetic construct
  source 1..23: mol_type = other RNA
  modified_base 1: mod_base = OTHER; note = 2'-O-methyl-adenosine
  modified_base 1^2: mod_base = OTHER; note = Phosphorothioate bond
  modified_base 2: mod_base = OTHER; note = 2'-Fluoro-uridine
  modified_base 2^3: mod_base = OTHER; note = Phosphorothioate bond
  modified_base 3: mod_base = OTHER; note = 2'-O-methyl-adenosine
  modified_base 4: mod_base = cm
  modified_base 5: mod_base = OTHER; note = 2'-O-methyl-adenosine
  modified_base 6: mod_base = OTHER; note = thermally destabilised analogue of uridine
  modified_base 7: mod_base = OTHER; note = 2'-O-methyl-adenosine
  modified_base 8: mod_base = gm
  modified_base 9: mod_base = gm
  modified_base 10: mod_base = OTHER; note = 2'-O-methyl-adenosine
  modified_base 11: mod_base = OTHER; note = 2'-O-methyl-adenosine
  modified_base 12: mod_base = OTHER; note = 2'-O-methyl-adenosine
  modified_base 13: mod_base = um
  modified_base 14: mod_base = OTHER; note = 2'-Fluoro-uridine
  modified_base 15: mod_base = cm
  modified_base 16: mod_base = OTHER; note = 2'-Fluoro-adenosine
  modified_base 17: mod_base = OTHER; note = 2'-O-methyl-adenosine
  modified_base 18: mod_base = gm
  modified_base 19: mod_base = um
  modified_base 20: mod_base = um
  modified_base 21: mod_base = um
  modified_base 21^22: mod_base = OTHER; note = Phosphorothioate bond
  modified_base 22: mod_base = OTHER; note = 2'-O-methyl-adenosine
  modified_base 22^23: mod_base = OTHER; note = Phosphorothioate bond
  modified_base 23: mod_base = cm
atacataggaaattcaagtttac

SEQ ID NO: 801 - RNA, 23 nt, synthetic construct
  source 1..23: mol_type = other RNA
  modified_base 1: mod_base = OTHER; note = 2'-O-methyl-adenosine
  modified_base 1^2: mod_base = OTHER; note = Phosphorothioate bond
  modified_base 2: mod_base = OTHER; note = 2'-Fluoro-uridine
  modified_base 2^3: mod_base = OTHER; note = Phosphorothioate bond
  modified_base 3: mod_base = OTHER; note = 2'-O-methyl-adenosine
  modified_base 4: mod_base = cm
  modified_base 5: mod_base = OTHER; note = 2'-O-methyl-adenosine
  modified_base 6: mod_base = OTHER; note = thermally destabilised analogue of uridine
  modified_base 7: mod_base = OTHER; note = 2'-O-methyl-adenosine
  modified_base 8: mod_base = OTHER; note = 2'-Fluoro-guanosine
  modified_base 9: mod_base = OTHER; note = 2'-Fluoro-guanosine
  modified_base 10: mod_base = OTHER; note = 2'-O-methyl-adenosine
  modified_base 11: mod_base = OTHER; note = 2'-O-methyl-adenosine
  modified_base 12: mod_base = OTHER; note = 2'-O-methyl-adenosine
  modified_base 13: mod_base = um
  modified_base 14: mod_base = OTHER; note = 2'-Fluoro-uridine
  modified_base 15: mod_base = cm
  modified_base 16: mod_base = OTHER; note = 2'-Fluoro-adenosine
  modified_base 17: mod_base = OTHER; note = 2'-O-methyl-adenosine
  modified_base 18: mod_base = gm
  modified_base 19: mod_base = um
  modified_base 20: mod_base = um
  modified_base 21: mod_base = um
  modified_base 21^22: mod_base = OTHER; note = Phosphorothioate bond
  modified_base 22: mod_base = OTHER; note = 2'-O-methyl-adenosine
  modified_base 22^23: mod_base = OTHER; note = Phosphorothioate bond
  modified_base 23: mod_base = cm
atacataggaaattcaagtttac

SEQ ID NO: 802 - RNA, 23 nt, synthetic construct
  source 1..23: mol_type = other RNA
  modified_base 1: mod_base = OTHER; note = 2'-O-methyl-adenosine
  modified_base 1^2: mod_base = OTHER; note = Phosphorothioate bond
  modified_base 2: mod_base = OTHER; note = 2'-Fluoro-uridine
  modified_base 2^3: mod_base = OTHER; note = Phosphorothioate bond
  modified_base 3: mod_base = OTHER; note = 2'-O-methyl-adenosine
  modified_base 4: mod_base = cm
  modified_base 5: mod_base = OTHER; note = 2'-O-methyl-adenosine
  modified_base 6: mod_base = OTHER; note = 2'-Fluoro-uridine
  modified_base 7: mod_base = OTHER; note = 2'-O-methyl-adenosine
  modified_base 8: mod_base = gm
  modified_base 9: mod_base = gm
  modified_base 10: mod_base = OTHER; note = 2'-O-methyl-adenosine
  modified_base 11: mod_base = OTHER; note = 2'-O-methyl-adenosine
  modified_base 12: mod_base = OTHER; note = 2'-O-methyl-adenosine
  modified_base 13: mod_base = um
  modified_base 14: mod_base = OTHER; note = 2'-Fluoro-uridine
  modified_base 15: mod_base = cm
  modified_base 16: mod_base = OTHER; note = 2'-Fluoro-adenosine
  modified_base 17: mod_base = OTHER; note = 2'-O-methyl-adenosine
  modified_base 18: mod_base = gm
  modified_base 19: mod_base = um
  modified_base 20: mod_base = OTHER; note = 2'-Fluoro-uridine
  modified_base 21: mod_base = um
  modified_base 21^22: mod_base = OTHER; note = Phosphorothioate bond
  modified_base 22: mod_base = OTHER; note = 2'-O-methyl-adenosine
  modified_base 22^23: mod_base = OTHER; note = Phosphorothioate bond
  modified_base 23: mod_base = cm
atacataggaaattcaagtttac

SEQ ID NO: 803 - RNA, 23 nt, synthetic construct
  source 1..23: mol_type = other RNA
  modified_base 1: mod_base = OTHER; note = 2'-O-methyl-adenosine
  modified_base 1^2: mod_base = OTHER; note = Phosphorothioate bond
  modified_base 2: mod_base = OTHER; note = 2'-Fluoro-uridine
  modified_base 2^3: mod_base = OTHER; note = Phosphorothioate bond
  modified_base 3: mod_base = OTHER; note = 2'-O-methyl-adenosine
  modified_base 4: mod_base = OTHER; note = 2'-Fluoro-cytidine
  modified_base 5: mod_base = OTHER; note = 2'-O-methyl-adenosine
  modified_base 6: mod_base = OTHER; note = 2'-Fluoro-uridine
  modified_base 7: mod_base = OTHER; note = 2'-O-methyl-adenosine
  modified_base 8: mod_base = gm
  modified_base 9: mod_base = gm
  modified_base 10: mod_base = OTHER; note = 2'-O-methyl-adenosine
  modified_base 11: mod_base = OTHER; note = 2'-O-methyl-adenosine
  modified_base 12: mod_base = OTHER; note = 2'-O-methyl-adenosine
  modified_base 13: mod_base = um
  modified_base 14: mod_base = OTHER; note = 2'-Fluoro-uridine
  modified_base 15: mod_base = cm
  modified_base 16: mod_base = OTHER; note = 2'-Fluoro-adenosine
  modified_base 17: mod_base = OTHER; note = 2'-O-methyl-adenosine
  modified_base 18: mod_base = gm
  modified_base 19: mod_base = um
  modified_base 20: mod_base = um
  modified_base 21: mod_base = um
  modified_base 21^22: mod_base = OTHER; note = Phosphorothioate bond
  modified_base 22: mod_base = OTHER; note = 2'-O-methyl-adenosine
  modified_base 22^23: mod_base = OTHER; note = Phosphorothioate bond
  modified_base 23: mod_base = cm
atacataggaaattcaagtttac

SEQ ID NO: 804 - RNA, 23 nt, synthetic construct
  source 1..23: mol_type = other RNA
  modified_base 1: mod_base = OTHER; note = 2'-O-methyl-adenosine
  modified_base 1^2: mod_base = OTHER; note = Phosphorothioate bond
  modified_base 2: mod_base = OTHER; note = 2'-Fluoro-uridine
  modified_base 2^3: mod_base = OTHER; note = Phosphorothioate bond
  modified_base 3: mod_base = OTHER; note = 2'-O-methyl-adenosine
  modified_base 4: mod_base = OTHER; note = 2'-Fluoro-cytidine
  modified_base 5: mod_base = OTHER; note = 2'-O-methyl-adenosine
  modified_base 6: mod_base = OTHER; note = 2'-Fluoro-uridine
  modified_base 7: mod_base = OTHER; note = 2'-O-methyl-adenosine
  modified_base 8: mod_base = OTHER; note = 2'-Fluoro-guanosine
  modified_base 9: mod_base = OTHER; note = 2'-Fluoro-guanosine
  modified_base 10: mod_base = OTHER; note = 2'-O-methyl-adenosine
  modified_base 11: mod_base = OTHER; note = 2'-O-methyl-adenosine
  modified_base 12: mod_base = OTHER; note = 2'-O-methyl-adenosine
  modified_base 13: mod_base = um
  modified_base 14: mod_base = OTHER; note = 2'-Fluoro-uridine
  modified_base 15: mod_base = cm
  modified_base 16: mod_base = OTHER; note = 2'-Fluoro-adenosine
  modified_base 17: mod_base = OTHER; note = 2'-O-methyl-adenosine
  modified_base 18: mod_base = gm
  modified_base 19: mod_base = um
  modified_base 20: mod_base = um
  modified_base 21: mod_base = um
  modified_base 21^22: mod_base = OTHER; note = Phosphorothioate bond
  modified_base 22: mod_base = OTHER; note = 2'-O-methyl-adenosine
  modified_base 22^23: mod_base = OTHER; note = Phosphorothioate bond
  modified_base 23: mod_base = cm
atacataggaaattcaagtttac

SEQ ID NO: 805 - RNA, 23 nt, synthetic construct
  source 1..23: mol_type = other RNA
  modified_base 1: mod_base = OTHER; note = 2'-O-methyl-adenosine
  modified_base 1^2: mod_base = OTHER; note = Phosphorothioate bond
  modified_base 2: mod_base = OTHER; note = 2'-Fluoro-uridine
  modified_base 2^3: mod_base = OTHER; note = Phosphorothioate bond
  modified_base 3: mod_base = OTHER; note = 2'-O-methyl-adenosine
  modified_base 4: mod_base = cm
  modified_base 5: mod_base = OTHER; note = 2'-O-methyl-adenosine
  modified_base 6: mod_base = OTHER; note = 2'-Fluoro-uridine
  modified_base 7: mod_base = OTHER; note = 2'-O-methyl-adenosine
  modified_base 8: mod_base = OTHER; note = 2'-Fluoro-guanosine
  modified_base 9: mod_base = OTHER; note = 2'-Fluoro-guanosine
  modified_base 10: mod_base = OTHER; note = 2'-O-methyl-adenosine
  modified_base 11: mod_base = OTHER; note = 2'-O-methyl-adenosine
  modified_base 12: mod_base = OTHER; note = 2'-O-methyl-adenosine
  modified_base 13: mod_base = um
  modified_base 14: mod_base = OTHER; note = 2'-Fluoro-uridine
  modified_base 15: mod_base = cm
  modified_base 16: mod_base = OTHER; note = 2'-Fluoro-adenosine
  modified_base 17: mod_base = OTHER; note = 2'-O-methyl-adenosine
  modified_base 18: mod_base = OTHER; note = 2'-Fluoro-guanosine
  modified_base 19: mod_base = um
  modified_base 20: mod_base = um
  modified_base 21: mod_base = um
  modified_base 21^22: mod_base = OTHER; note = Phosphorothioate bond
  modified_base 22: mod_base = OTHER; note = 2'-O-methyl-adenosine
  modified_base 22^23: mod_base = OTHER; note = Phosphorothioate bond
  modified_base 23: mod_base = cm
atacataggaaattcaagtttac

SEQ ID NO: 806 - RNA, 23 nt, synthetic construct
  source 1..23: mol_type = other RNA
  modified_base 1: mod_base = OTHER; note = 2'-O-methyl-adenosine
  modified_base 1^2: mod_base = OTHER; note = Phosphorothioate bond
  modified_base 2: mod_base = OTHER; note = 2'-Fluoro-uridine
  modified_base 2^3: mod_base = OTHER; note = Phosphorothioate bond
  modified_base 3: mod_base = OTHER; note = 2'-O-methyl-adenosine
  modified_base 4: mod_base = cm
  modified_base 5: mod_base = OTHER; note = 2'-O-methyl-adenosine
  modified_base 6: mod_base = OTHER; note = 2'-Fluoro-uridine
  modified_base 7: mod_base = OTHER; note = 2'-O-methyl-adenosine
  modified_base 8: mod_base = OTHER; note = 2'-Fluoro-guanosine
  modified_base 9: mod_base = OTHER; note = 2'-Fluoro-guanosine
  modified_base 10: mod_base = OTHER; note = 2'-O-methyl-adenosine
  modified_base 11: mod_base = OTHER; note = 2'-O-methyl-adenosine
  modified_base 12: mod_base = OTHER; note = 2'-O-methyl-adenosine
  modified_base 13: mod_base = um
  modified_base 14: mod_base = OTHER; note = 2'-Fluoro-uridine
  modified_base 15: mod_base = cm
  modified_base 16: mod_base = OTHER; note = 2'-Fluoro-adenosine
  modified_base 17: mod_base = OTHER; note = 2'-O-methyl-adenosine
  modified_base 18: mod_base = gm
  modified_base 19: mod_base = um
  modified_base 20: mod_base = OTHER; note = 2'-Fluoro-uridine
  modified_base 21: mod_base = um
  modified_base 21^22: mod_base = OTHER; note = Phosphorothioate bond
  modified_base 22: mod_base = OTHER; note = 2'-O-methyl-adenosine
  modified_base 22^23: mod_base = OTHER; note = Phosphorothioate bond
  modified_base 23: mod_base = cm
atacataggaaattcaagtttac

SEQ ID NO: 807 - RNA, 23 nt, synthetic construct
  source 1..23: mol_type = other RNA
  modified_base 1: mod_base = OTHER; note = 2'-O-methyl-adenosine
  modified_base 1^2: mod_base = OTHER; note = Phosphorothioate bond
  modified_base 2: mod_base = OTHER; note = 2'-Fluoro-adenosine
  modified_base 2^3: mod_base = OTHER; note = Phosphorothioate bond
  modified_base 3: mod_base = OTHER; note = 2'-O-methyl-adenosine
  modified_base 4: mod_base = OTHER; note = 2'-O-methyl-adenosine
  modified_base 5: mod_base = um
  modified_base 6: mod_base = OTHER; note = 2'-Fluoro-adenosine
  modified_base 7: mod_base = cm
  modified_base 8: mod_base = OTHER; note = 2'-O-methyl-adenosine
  modified_base 9: mod_base = um
  modified_base 10: mod_base = OTHER; note = 2'-O-methyl-adenosine
  modified_base 11: mod_base = gm
  modified_base 12: mod_base = gm
  modified_base 13: mod_base = OTHER; note = 2'-O-methyl-adenosine
  modified_base 14: mod_base = OTHER; note = 2'-Fluoro-adenosine
  modified_base 15: mod_base = OTHER; note = 2'-O-methyl-adenosine
  modified_base 16: mod_base = OTHER; note = 2'-Fluoro-uridine
  modified_base 17: mod_base = um
  modified_base 18: mod_base = OTHER; note = 2'-Fluoro-cytidine
  modified_base 19: mod_base = OTHER; note = 2'-O-methyl-adenosine
  modified_base 20: mod_base = OTHER; note = 2'-O-methyl-adenosine
  modified_base 21: mod_base = gm
  modified_base 21^22: mod_base = OTHER; note = Phosphorothioate bond
  modified_base 22: mod_base = um
  modified_base 22^23: mod_base = OTHER; note = Phosphorothioate bond
  modified_base 23: mod_base = um
aaaatacataggaaattcaagtt

SEQ ID NO: 808 - RNA, 23 nt, synthetic construct
  source 1..23: mol_type = other RNA
  modified_base 1: mod_base = OTHER; note = 2'-O-methyl-adenosine
  modified_base 1^2: mod_base = OTHER; note = Phosphorothioate bond
  modified_base 2: mod_base = OTHER; note = 2'-Fluoro-adenosine
  modified_base 2^3: mod_base = OTHER; note = Phosphorothioate bond
  modified_base 3: mod_base = OTHER; note = 2'-O-methyl-adenosine
  modified_base 4: mod_base = OTHER; note = 2'-O-methyl-adenosine
  modified_base 5: mod_base = um
  modified_base 6: mod_base = OTHER; note = thermally destabilised analogue of adenosine
  modified_base 7: mod_base = cm
  modified_base 8: mod_base = OTHER; note = 2'-O-methyl-adenosine
  modified_base 9: mod_base = um
  modified_base 10: mod_base = OTHER; note = 2'-O-methyl-adenosine
  modified_base 11: mod_base = gm
  modified_base 12: mod_base = gm
  modified_base 13: mod_base = OTHER; note = 2'-O-methyl-adenosine
  modified_base 14: mod_base = OTHER; note = 2'-Fluoro-adenosine
  modified_base 15: mod_base = OTHER; note = 2'-O-methyl-adenosine
  modified_base 16: mod_base = OTHER; note = 2'-Fluoro-uridine
  modified_base 17: mod_base = um
  modified_base 18: mod_base = cm
  modified_base 19: mod_base = OTHER; note = 2'-O-methyl-adenosine
  modified_base 20: mod_base = OTHER; note = 2'-O-methyl-adenosine
  modified_base 21: mod_base = gm
  modified_base 21^22: mod_base = OTHER; note = Phosphorothioate bond
  modified_base 22: mod_base = um
  modified_base 22^23: mod_base = OTHER; note = Phosphorothioate bond
  modified_base 23: mod_base = um
aaaatacataggaaattcaagtt

SEQ ID NO: 809 - RNA, 23 nt, synthetic construct
  source 1..23: mol_type = other RNA
  modified_base 1: mod_base = OTHER; note = 2'-O-methyl-adenosine
  modified_base 1^2: mod_base = OTHER; note = Phosphorothioate bond
  modified_base 2: mod_base = OTHER; note = 2'-Fluoro-adenosine
  modified_base 2^3: mod_base = OTHER; note = Phosphorothioate bond
  modified_base 3: mod_base = OTHER; note = 2'-O-methyl-adenosine
  modified_base 4: mod_base = OTHER; note = 2'-O-methyl-adenosine
  modified_base 5: mod_base = um
  modified_base 6: mod_base = OTHER; note = thermally destabilised analogue of adenosine
  modified_base 7: mod_base = cm
  modified_base 8: mod_base = OTHER; note = 2'-Fluoro-adenosine
  modified_base 9: mod_base = OTHER; note = 2'-Fluoro-uridine
  modified_base 10: mod_base = OTHER; note = 2'-O-methyl-adenosine
  modified_base 11: mod_base = gm
  modified_base 12: mod_base = gm
  modified_base 13: mod_base = OTHER; note = 2'-O-methyl-adenosine
  modified_base 14: mod_base = OTHER; note = 2'-Fluoro-adenosine
  modified_base 15: mod_base = OTHER; note = 2'-O-methyl-adenosine
  modified_base 16: mod_base = OTHER; note = 2'-Fluoro-uridine
  modified_base 17: mod_base = um
  modified_base 18: mod_base = cm
  modified_base 19: mod_base = OTHER; note = 2'-O-methyl-adenosine
  modified_base 20: mod_base = OTHER; note = 2'-O-methyl-adenosine
  modified_base 21: mod_base = gm
  modified_base 21^22: mod_base = OTHER; note = Phosphorothioate bond
  modified_base 22: mod_base = um
  modified_base 22^23: mod_base = OTHER; note = Phosphorothioate bond
  modified_base 23: mod_base = um
aaaatacataggaaattcaagtt

SEQ ID NO: 810 - RNA, 23 nt, synthetic construct
  source 1..23: mol_type = other RNA
  modified_base 1: mod_base = OTHER; note = 2'-O-methyl-adenosine
  modified_base 1^2: mod_base = OTHER; note = Phosphorothioate bond
  modified_base 2: mod_base = OTHER; note = 2'-Fluoro-adenosine
  modified_base 2^3: mod_base = OTHER; note = Phosphorothioate bond
  modified_base 3: mod_base = OTHER; note = 2'-O-methyl-adenosine
  modified_base 4: mod_base = OTHER; note = 2'-O-methyl-adenosine
  modified_base 5: mod_base = um
  modified_base 6: mod_base = OTHER; note = 2'-Fluoro-adenosine
  modified_base 7: mod_base = cm
  modified_base 8: mod_base = OTHER; note = 2'-O-methyl-adenosine
  modified_base 9: mod_base = um
  modified_base 10: mod_base = OTHER; note = 2'-O-methyl-adenosine
  modified_base 11: mod_base = gm
  modified_base 12: mod_base = gm
  modified_base 13: mod_base = OTHER; note = 2'-O-methyl-adenosine
  modified_base 14: mod_base = OTHER; note = 2'-Fluoro-adenosine
  modified_base 15: mod_base = OTHER; note = 2'-O-methyl-adenosine
  modified_base 16: mod_base = OTHER; note = 2'-Fluoro-uridine
  modified_base 17: mod_base = um
  modified_base 18: mod_base = cm
  modified_base 19: mod_base = OTHER; note = 2'-O-methyl-adenosine
  modified_base 20: mod_base = OTHER; note = 2'-Fluoro-adenosine
  modified_base 21: mod_base = gm
  modified_base 21^22: mod_base = OTHER; note = Phosphorothioate bond
  modified_base 22: mod_base = um
  modified_base 22^23: mod_base = OTHER; note = Phosphorothioate bond
  modified_base 23: mod_base = um
aaaatacataggaaattcaagtt

SEQ ID NO: 811 - RNA, 23 nt, synthetic construct
  source 1..23: mol_type = other RNA
  modified_base 1: mod_base = OTHER; note = 2'-O-methyl-adenosine
  modified_base 1^2: mod_base = OTHER; note = Phosphorothioate bond
  modified_base 2: mod_base = OTHER; note = 2'-Fluoro-adenosine
  modified_base 2^3: mod_base = OTHER; note = Phosphorothioate bond
  modified_base 3: mod_base = OTHER; note = 2'-O-methyl-adenosine
  modified_base 4: mod_base = OTHER; note = 2'-Fluoro-adenosine
  modified_base 5: mod_base = um
  modified_base 6: mod_base = OTHER; note = 2'-Fluoro-adenosine
  modified_base 7: mod_base = cm
  modified_base 8: mod_base = OTHER; note = 2'-O-methyl-adenosine
  modified_base 9: mod_base = um
  modified_base 10: mod_base = OTHER; note = 2'-O-methyl-adenosine
  modified_base 11: mod_base = gm
  modified_base 12: mod_base = gm
  modified_base 13: mod_base = OTHER; note = 2'-O-methyl-adenosine
  modified_base 14: mod_base = OTHER; note = 2'-Fluoro-adenosine
  modified_base 15: mod_base = OTHER; note = 2'-O-methyl-adenosine
  modified_base 16: mod_base = OTHER; note = 2'-Fluoro-uridine
  modified_base 17: mod_base = um
  modified_base 18: mod_base = cm
  modified_base 19: mod_base = OTHER; note = 2'-O-methyl-adenosine
  modified_base 20: mod_base = OTHER; note = 2'-O-methyl-adenosine
  modified_base 21: mod_base = gm
  modified_base 21^22: mod_base = OTHER; note = Phosphorothioate bond
  modified_base 22: mod_base = um
  modified_base 22^23: mod_base = OTHER; note = Phosphorothioate bond
  modified_base 23: mod_base = um
aaaatacataggaaattcaagtt

SEQ ID NO: 812 - RNA, 23 nt, synthetic construct
  source 1..23: mol_type = other RNA
  modified_base 1: mod_base = OTHER; note = 2'-O-methyl-adenosine
  modified_base 1^2: mod_base = OTHER; note = Phosphorothioate bond
  modified_base 2: mod_base = OTHER; note = 2'-Fluoro-adenosine
  modified_base 2^3: mod_base = OTHER; note = Phosphorothioate bond
  modified_base 3: mod_base = OTHER; note = 2'-O-methyl-adenosine
  modified_base 4: mod_base = OTHER; note = 2'-Fluoro-adenosine
  modified_base 5: mod_base = um
  modified_base 6: mod_base = OTHER; note = 2'-Fluoro-adenosine
  modified_base 7: mod_base = cm
  modified_base 8: mod_base = OTHER; note = 2'-Fluoro-adenosine
  modified_base 9: mod_base = OTHER; note = 2'-Fluoro-uridine
  modified_base 10: mod_base = OTHER; note = 2'-O-methyl-adenosine
  modified_base 11: mod_base = gm
  modified_base 12: mod_base = gm
  modified_base 13: mod_base = OTHER; note = 2'-O-methyl-adenosine
  modified_base 14: mod_base = OTHER; note = 2'-Fluoro-adenosine
  modified_base 15: mod_base = OTHER; note = 2'-O-methyl-adenosine
  modified_base 16: mod_base = OTHER; note = 2'-Fluoro-uridine
  modified_base 17: mod_base = um
  modified_base 18: mod_base = cm
  modified_base 19: mod_base = OTHER; note = 2'-O-methyl-adenosine
  modified_base 20: mod_base = OTHER; note = 2'-O-methyl-adenosine
  modified_base 21: mod_base = gm
  modified_base 21^22: mod_base = OTHER; note = Phosphorothioate bond
  modified_base 22: mod_base = um
  modified_base 22^23: mod_base = OTHER; note = Phosphorothioate bond
  modified_base 23: mod_base = um
aaaatacataggaaattcaagtt

SEQ ID NO: 813 - RNA, 23 nt, synthetic construct
  source 1..23: mol_type = other RNA
  modified_base 1: mod_base = OTHER; note = 2'-O-methyl-adenosine
  modified_base 1^2: mod_base = OTHER; note = Phosphorothioate bond
  modified_base 2: mod_base = OTHER; note = 2'-Fluoro-adenosine
  modified_base 2^3: mod_base = OTHER; note = Phosphorothioate bond
  modified_base 3: mod_base = OTHER; note = 2'-O-methyl-adenosine
  modified_base 4: mod_base = OTHER; note = 2'-O-methyl-adenosine
  modified_base 5: mod_base = um
  modified_base 6: mod_base = OTHER; note = 2'-Fluoro-adenosine
  modified_base 7: mod_base = cm
  modified_base 8: mod_base = OTHER; note = 2'-Fluoro-adenosine
  modified_base 9: mod_base = OTHER; note = 2'-Fluoro-uridine
  modified_base 10: mod_base = OTHER; note = 2'-O-methyl-adenosine
  modified_base 11: mod_base = gm
  modified_base 12: mod_base = gm
  modified_base 13: mod_base = OTHER; note = 2'-O-methyl-adenosine
  modified_base 14: mod_base = OTHER; note = 2'-Fluoro-adenosine
  modified_base 15: mod_base = OTHER; note = 2'-O-methyl-adenosine
  modified_base 16: mod_base = OTHER; note = 2'-Fluoro-uridine
  modified_base 17: mod_base = um
  modified_base 18: mod_base = OTHER; note = 2'-Fluoro-cytidine
  modified_base 19: mod_base = OTHER; note = 2'-O-methyl-adenosine
  modified_base 20: mod_base = OTHER; note = 2'-O-methyl-adenosine
  modified_base 21: mod_base = gm
  modified_base 21^22: mod_base = OTHER; note = Phosphorothioate bond
  modified_base 22: mod_base = um
  modified_base 22^23: mod_base = OTHER; note = Phosphorothioate bond
  modified_base 23: mod_base = um
aaaatacataggaaattcaagtt

SEQ ID NO: 814 - RNA, 23 nt, synthetic construct
  source 1..23: mol_type = other RNA
  modified_base 1: mod_base = OTHER; note = 2'-O-methyl-adenosine
  modified_base 1^2: mod_base = OTHER; note = Phosphorothioate bond
  modified_base 2: mod_base = OTHER; note = 2'-Fluoro-adenosine
  modified_base 2^3: mod_base = OTHER; note = Phosphorothioate bond
  modified_base 3: mod_base = OTHER; note = 2'-O-methyl-adenosine
  modified_base 4: mod_base = OTHER; note = 2'-O-methyl-adenosine
  modified_base 5: mod_base = um
  modified_base 6: mod_base = OTHER; note = 2'-Fluoro-adenosine
  modified_base 7: mod_base = cm
  modified_base 8: mod_base = OTHER; note = 2'-Fluoro-adenosine
  modified_base 9: mod_base = OTHER; note = 2'-Fluoro-uridine
  modified_base 10: mod_base = OTHER; note = 2'-O-methyl-adenosine
  modified_base 11: mod_base = gm
  modified_base 12: mod_base = gm
  modified_base 13: mod_base = OTHER; note = 2'-O-methyl-adenosine
  modified_base 14: mod_base = OTHER; note = 2'-Fluoro-adenosine
  modified_base 15: mod_base = OTHER; note = 2'-O-methyl-adenosine
  modified_base 16: mod_base = OTHER; note = 2'-Fluoro-uridine
  modified_base 17: mod_base = um
  modified_base 18: mod_base = cm
  modified_base 19: mod_base = OTHER; note = 2'-O-methyl-adenosine
  modified_base 20: mod_base = OTHER; note = 2'-Fluoro-adenosine
  modified_base 21: mod_base = gm
  modified_base 21^22: mod_base = OTHER; note = Phosphorothioate bond
  modified_base 22: mod_base = um
  modified_base 22^23: mod_base = OTHER; note = Phosphorothioate bond
  modified_base 23: mod_base = um
aaaatacataggaaattcaagtt

SEQ ID NO: 815 - RNA, 23 nt, synthetic construct
  source 1..23: mol_type = other RNA
  modified_base 1: mod_base = gm
  modified_base 1^2: mod_base = OTHER; note = Phosphorothioate bond
  modified_base 2: mod_base = OTHER; note = 2'-Fluoro-cytidine
  modified_base 2^3: mod_base = OTHER; note = Phosphorothioate bond
  modified_base 3: mod_base = um
  modified_base 4: mod_base = gm
  modified_base 5: mod_base = OTHER; note = 2'-O-methyl-adenosine
  modified_base 6: mod_base = OTHER; note = 2'-Fluoro-adenosine
  modified_base 7: mod_base = um
  modified_base 8: mod_base = cm
  modified_base 9: mod_base = cm
  modified_base 10: mod_base = OTHER; note = 2'-O-methyl-adenosine
  modified_base 11: mod_base = OTHER; note = 2'-O-methyl-adenosine
  modified_base 12: mod_base = OTHER; note = 2'-O-methyl-adenosine
  modified_base 13: mod_base = cm
  modified_base 14: mod_base = OTHER; note = 2'-Fluoro-uridine
  modified_base 15: mod_base = um
  modified_base 16: mod_base = OTHER; note = 2'-Fluoro-adenosine
  modified_base 17: mod_base = um
  modified_base 18: mod_base = OTHER; note = 2'-Fluoro-cytidine
  modified_base 19: mod_base = cm
  modified_base 20: mod_base = OTHER; note = 2'-O-methyl-adenosine
  modified_base 21: mod_base = um
  modified_base 21^22: mod_base = OTHER; note = Phosphorothioate bond
  modified_base 22: mod_base = um
  modified_base 22^23: mod_base = OTHER; note = Phosphorothioate bond
  modified_base 23: mod_base = gm
gctgaatccaaacttatccattg

SEQ ID NO: 816 - RNA, 23 nt, synthetic construct
  source 1..23: mol_type = other RNA
  modified_base 1: mod_base = um
  modified_base 1^2: mod_base = OTHER; note = Phosphorothioate bond
  modified_base 2: mod_base = OTHER; note = 2'-Fluoro-cytidine
  modified_base 2^3: mod_base = OTHER; note = Phosphorothioate bond
  modified_base 3: mod_base = um
  modified_base 4: mod_base = gm
  modified_base 5: mod_base = um
  modified_base 6: mod_base = OTHER; note = 2'-Fluoro-uridine
  modified_base 7: mod_base = OTHER; note = 2'-O-methyl-adenosine
  modified_base 8: mod_base = OTHER; note = 2'-O-methyl-adenosine
  modified_base 9: mod_base = OTHER; note = 2'-O-methyl-adenosine
  modified_base 10: mod_base = um
  modified_base 11: mod_base = um
  modified_base 12: mod_base = OTHER; note = 2'-O-methyl-adenosine
  modified_base 13: mod_base = cm
  modified_base 14: mod_base = OTHER; note = 2'-Fluoro-adenosine
  modified_base 15: mod_base = OTHER; note = 2'-O-methyl-adenosine
  modified_base 16: mod_base = OTHER; note = 2'-Fluoro-cytidine
  modified_base 17: mod_base = um
  modified_base 18: mod_base = OTHER; note = 2'-Fluoro-adenosine
  modified_base 19: mod_base = cm
  modified_base 20: mod_base = cm
  modified_base 21: mod_base = OTHER; note = 2'-O-methyl-adenosine
  modified_base 21^22: mod_base = OTHER; note = Phosphorothioate bond
  modified_base 22: mod_base = OTHER; note = 2'-O-methyl-adenosine
  modified_base 22^23: mod_base = OTHER; note = Phosphorothioate bond
  modified_base 23: mod_base = OTHER; note = 2'-O-methyl-adenosine
tctgttaaattacaactaccaaa

SEQ ID NO: 817 - RNA, 23 nt, synthetic construct
  source 1..23: mol_type = other RNA
  modified_base 1: mod_base = um
  modified_base 1^2: mod_base = OTHER; note = Phosphorothioate bond
  modified_base 2: mod_base = OTHER; note = 2'-Fluoro-adenosine
  modified_base 2^3: mod_base = OTHER; note = Phosphorothioate bond
  modified_base 3: mod_base = OTHER; note = 2'-O-methyl-adenosine
  modified_base 4: mod_base = OTHER; note = 2'-O-methyl-adenosine
  modified_base 5: mod_base = cm
  modified_base 6: mod_base = OTHER; note = 2'-Fluoro-adenosine
  modified_base 7: mod_base = OTHER; note = 2'-O-methyl-adenosine
  modified_base 8: mod_base = cm
  modified_base 9: mod_base = cm
  modified_base 10: mod_base = um
  modified_base 11: mod_base = gm
  modified_base 12: mod_base = OTHER; note = 2'-O-methyl-adenosine
  modified_base 13: mod_base = cm
  modified_base 14: mod_base = OTHER; note = 2'-Fluoro-uridine
  modified_base 15: mod_base = gm
  modified_base 16: mod_base = OTHER; note = 2'-Fluoro-cytidine
  modified_base 17: mod_base = um
  modified_base 18: mod_base = OTHER; note = 2'-Fluoro-guanosine
  modified_base 19: mod_base = um
  modified_base 20: mod_base = um
  modified_base 21: mod_base = OTHER; note = 2'-O-methyl-adenosine
  modified_base 21^22: mod_base = OTHER; note = Phosphorothioate bond
  modified_base 22: mod_base = um
  modified_base 22^23: mod_base = OTHER; note = Phosphorothioate bond
  modified_base 23: mod_base = um
taaacaacctgactgctgttatt

SEQ ID NO: 818 - RNA, 23 nt, synthetic construct
  source 1..23: mol_type = other RNA
  modified_base 1: mod_base = um
  modified_base 1^2: mod_base = OTHER; note = Phosphorothioate bond
  modified_base 2: mod_base = OTHER; note = 2'-Fluoro-uridine
  modified_base 2^3: mod_base = OTHER; note = Phosphorothioate bond
  modified_base 3: mod_base = OTHER; note = 2'-O-methyl-adenosine
  modified_base 4: mod_base = cm
  modified_base 5: mod_base = OTHER; note = 2'-O-methyl-adenosine
  modified_base 6: mod_base = OTHER; note = 2'-Fluoro-uridine
  modified_base 7: mod_base = um
  modified_base 8: mod_base = cm
  modified_base 9: mod_base = OTHER; note = 2'-O-methyl-adenosine
  modified_base 10: mod_base = gm
  modified_base 11: mod_base = OTHER; note = 2'-O-methyl-adenosine
  modified_base 12: mod_base = OTHER; note = 2'-O-methyl-adenosine
  modified_base 13: mod_base = OTHER; note = 2'-O-methyl-adenosine
  modified_base 14: mod_base = OTHER; note = 2'-Fluoro-uridine
  modified_base 15: mod_base = cm
  modified_base 16: mod_base = OTHER; note = 2'-Fluoro-adenosine
  modified_base 17: mod_base = gm
  modified_base 18: mod_base = OTHER; note = 2'-Fluoro-adenosine
  modified_base 19: mod_base = cm
  modified_base 20: mod_base = OTHER; note = 2'-O-methyl-adenosine
  modified_base 21: mod_base = OTHER; note = 2'-O-methyl-adenosine
  modified_base 21^22: mod_base = OTHER; note = Phosphorothioate bond
  modified_base 22: mod_base = um
  modified_base 22^23: mod_base = OTHER; note = Phosphorothioate bond
  modified_base 23: mod_base = cm
ttacattcagaaatcagacaatc

SEQ ID NO: 819 - RNA, 23 nt, synthetic construct
  source 1..23: mol_type = other RNA
  modified_base 1: mod_base = OTHER; note = 2'-O-methyl-adenosine
  modified_base 1^2: mod_base = OTHER; note = Phosphorothioate bond
  modified_base 2: mod_base = OTHER; note = 2'-Fluoro-uridine
  modified_base 2^3: mod_base = OTHER; note = Phosphorothioate bond
  modified_base 3: mod_base = OTHER; note = 2'-O-methyl-adenosine
  modified_base 4: mod_base = cm
  modified_base 5: mod_base = OTHER; note = 2'-O-methyl-adenosine
  modified_base 6: mod_base = OTHER; note = 2'-Fluoro-guanosine
  modified_base 7: mod_base = um
  modified_base 8: mod_base = um
  modified_base 9: mod_base = cm
  modified_base 10: mod_base = um
  modified_base 11: mod_base = gm
  modified_base 12: mod_base = um
  modified_base 13: mod_base = um
  modified_base 14: mod_base = OTHER; note = 2'-Fluoro-uridine
  modified_base 15: mod_base = um
  modified_base 16: mod_base = OTHER; note = 2'-Fluoro-guanosine
  modified_base 17: mod_base = OTHER; note = 2'-O-methyl-adenosine
  modified_base 18: mod_base = OTHER; note = 2'-Fluoro-adenosine
  modified_base 19: mod_base = cm
  modified_base 20: mod_base = OTHER; note = 2'-O-methyl-adenosine
  modified_base 21: mod_base = cm
  modified_base 21^22: mod_base = OTHER; note = Phosphorothioate bond
  modified_base 22: mod_base = cm
  modified_base 22^23: mod_base = OTHER; note = Phosphorothioate bond
  modified_base 23: mod_base = OTHER; note = 2'-O-methyl-adenosine
atacagttctgttttgaacacca

SEQ ID NO: 820 - RNA, 23 nt, synthetic construct
  source 1..23: mol_type = other RNA
  modified_base 1: mod_base = OTHER; note = 2'-O-methyl-adenosine
  modified_base 1^2: mod_base = OTHER; note = Phosphorothioate bond
  modified_base 2: mod_base = OTHER; note = 2'-Fluoro-adenosine
  modified_base 2^3: mod_base = OTHER; note = Phosphorothioate bond
  modified_base 3: mod_base = OTHER; note = 2'-O-methyl-adenosine
  modified_base 4: mod_base = OTHER; note = 2'-O-methyl-adenosine
  modified_base 5: mod_base = gm
  modified_base 6: mod_base = OTHER; note = 2'-Fluoro-adenosine
  modified_base 7: mod_base = OTHER; note = 2'-O-methyl-adenosine
  modified_base 8: mod_base = cm
  modified_base 9: mod_base = cm
  modified_base 10: mod_base = OTHER; note = 2'-O-methyl-adenosine
  modified_base 11: mod_base = OTHER; note = 2'-O-methyl-adenosine
  modified_base 12: mod_base = gm
  modified_base 13: mod_base = um
  modified_base 14: mod_base = OTHER; note = 2'-Fluoro-uridine
  modified_base 15: mod_base = OTHER; note = 2'-O-methyl-adenosine
  modified_base 16: mod_base = OTHER; note = 2'-Fluoro-guanosine
  modified_base 17: mod_base = cm
  modified_base 18: mod_base = OTHER; note = 2'-Fluoro-adenosine
  modified_base 19: mod_base = um
  modified_base 20: mod_base = cm
  modified_base 21: mod_base = um
  modified_base 21^22: mod_base = OTHER; note = Phosphorothioate bond
  modified_base 22: mod_base = gm
  modified_base 22^23: mod_base = OTHER; note = Phosphorothioate bond
  modified_base 23: mod_base = OTHER; note = 2'-O-methyl-adenosine
aaaagaaccaagttagcatctga

SEQ ID NO: 821 - RNA, 23 nt, synthetic construct
  source 1..23: mol_type = other RNA
  modified_base 1: mod_base = OTHER; note = 2'-O-methyl-adenosine
  modified_base 1^2: mod_base = OTHER; note = Phosphorothioate bond
  modified_base 2: mod_base = OTHER; note = 2'-Fluoro-adenosine
  modified_base 2^3: mod_base = OTHER; note = Phosphorothioate bond
  modified_base 3: mod_base = cm
  modified_base 4: mod_base = cm
  modified_base 5: mod_base = OTHER; note = 2'-O-methyl-adenosine
  modified_base 6: mod_base = OTHER; note = 2'-Fluoro-adenosine
  modified_base 7: mod_base = gm
  modified_base 8: mod_base = um
  modified_base 9: mod_base = um
  modified_base 10: mod_base = OTHER; note = 2'-O-methyl-adenosine
  modified_base 11: mod_base = gm
  modified_base 12: mod_base = cm
  modified_base 13: mod_base = OTHER; note = 2'-O-methyl-adenosine
  modified_base 14: mod_base = OTHER; note = 2'-Fluoro-uridine
  modified_base 15: mod_base = cm
  modified_base 16: mod_base = OTHER; note = 2'-Fluoro-uridine
  modified_base 17: mod_base = gm
  modified_base 18: mod_base = OTHER; note = 2'-Fluoro-adenosine
  modified_base 19: mod_base = gm
  modified_base 20: mod_base = OTHER; note = 2'-O-methyl-adenosine
  modified_base 21: mod_base = um
  modified_base 21^22: mod_base = OTHER; note = Phosphorothioate bond
  modified_base 22: mod_base = gm
  modified_base 22^23: mod_base = OTHER; note = Phosphorothioate bond
  modified_base 23: mod_base = cm
aaccaagttagcatctgagatgc

SEQ ID NO: 822 - RNA, 23 nt, synthetic construct
  source 1..23: mol_type = other RNA
  modified_base 1: mod_base = um
  modified_base 1^2: mod_base = OTHER; note = Phosphorothioate bond
  modified_base 2: mod_base = OTHER; note = 2'-Fluoro-uridine
  modified_base 2^3: mod_base = OTHER; note = Phosphorothioate bond
  modified_base 3: mod_base = um
  modified_base 4: mod_base = OTHER; note = 2'-O-methyl-adenosine
  modified_base 5: mod_base = cm
  modified_base 6: mod_base = OTHER; note = 2'-Fluoro-adenosine
  modified_base 7: mod_base = um
  modified_base 8: mod_base = um
  modified_base 9: mod_base = cm
  modified_base 10: mod_base = OTHER; note = 2'-O-methyl-adenosine
  modified_base 11: mod_base = gm
  modified_base 12: mod_base = OTHER; note = 2'-O-methyl-adenosine
  modified_base 13: mod_base = OTHER; note = 2'-O-methyl-adenosine
  modified_base 14: mod_base = OTHER; note = 2'-Fluoro-adenosine
  modified_base 15: mod_base = um
  modified_base 16: mod_base = OTHER; note = 2'-Fluoro-cytidine
  modified_base 17: mod_base = OTHER; note = 2'-O-methyl-adenosine
  modified_base 18: mod_base = OTHER; note = 2'-Fluoro-guanosine
  modified_base 19: mod_base = OTHER; note = 2'-O-methyl-adenosine
  modified_base 20: mod_base = cm
  modified_base 21: mod_base = OTHER; note = 2'-O-methyl-adenosine
  modified_base 21^22: mod_base = OTHER; note = Phosphorothioate bond
  modified_base 22: mod_base = OTHER; note = 2'-O-methyl-adenosine
  modified_base 22^23: mod_base = OTHER; note = Phosphorothioate bond
  modified_base 23: mod_base = um
tttacattcagaaatcagacaat

SEQ ID NO: 823 - RNA, 23 nt, synthetic construct
  source 1..23: mol_type = other RNA
  modified_base 1: mod_base = OTHER; note = 2'-O-methyl-adenosine
  modified_base 1^2: mod_base = OTHER; note = Phosphorothioate bond
  modified_base 2: mod_base = OTHER; note = 2'-Fluoro-adenosine
  modified_base 2^3: mod_base = OTHER; note = Phosphorothioate bond
  modified_base 3: mod_base = OTHER; note = 2'-O-methyl-adenosine
  modified_base 4: mod_base = gm
  modified_base 5: mod_base = OTHER; note = 2'-O-methyl-adenosine
  modified_base 6: mod_base = OTHER; note = 2'-Fluoro-adenosine
  modified_base 7: mod_base = cm
  modified_base 8: mod_base = cm
  modified_base 9: mod_base = OTHER; note = 2'-O-methyl-adenosine
  modified_base 10: mod_base = OTHER; note = 2'-O-methyl-adenosine
  modified_base 11: mod_base = gm
  modified_base 12: mod_base = um
  modified_base 13: mod_base = um
  modified_base 14: mod_base = OTHER; note = 2'-Fluoro-adenosine
  modified_base 15: mod_base = gm
  modified_base 16: mod_base = OTHER; note = 2'-Fluoro-cytidine
  modified_base 17: mod_base = OTHER; note = 2'-O-methyl-adenosine
  modified_base 18: mod_base = OTHER; note = 2'-Fluoro-uridine
  modified_base 19: mod_base = cm
  modified_base 20: mod_base = um
  modified_base 21: mod_base = gm
  modified_base 21^22: mod_base = OTHER; note = Phosphorothioate bond
  modified_base 22: mod_base = OTHER; note = 2'-O-methyl-adenosine
  modified_base 22^23: mod_base = OTHER; note = Phosphorothioate bond
  modified_base 23: mod_base = gm
aaagaaccaagttagcatctgag

SEQ ID NO: 824 - RNA, 23 nt, synthetic construct
  source 1..23: mol_type = other RNA
  modified_base 1: mod_base = um
  modified_base 1^2: mod_base = OTHER; note = Phosphorothioate bond
  modified_base 2: mod_base = OTHER; note = 2'-Fluoro-uridine
  modified_base 2^3: mod_base = OTHER; note = Phosphorothioate bond
  modified_base 3: mod_base = um
  modified_base 4: mod_base = um
  modified_base 5: mod_base = cm
  modified_base 6: mod_base = OTHER; note = 2'-Fluoro-uridine
  modified_base 7: mod_base = gm
  modified_base 8: mod_base = um
  modified_base 9: mod_base = um
  modified_base 10: mod_base = OTHER; note = 2'-O-methyl-adenosine
  modified_base 11: mod_base = OTHER; note = 2'-O-methyl-adenosine
  modified_base 12: mod_base = OTHER; note = 2'-O-methyl-adenosine
  modified_base 13: mod_base = um
  modified_base 14: mod_base = OTHER; note = 2'-Fluoro-uridine
  modified_base 15: mod_base = OTHER; note = 2'-O-methyl-adenosine
  modified_base 16: mod_base = OTHER; note = 2'-Fluoro-cytidine
  modified_base 17: mod_base = OTHER; note = 2'-O-methyl-adenosine
  modified_base 18: mod_base = OTHER; note = 2'-Fluoro-adenosine
  modified_base 19: mod_base = cm
  modified_base 20: mod_base = um
  modified_base 21: mod_base = OTHER; note = 2'-O-methyl-adenosine
  modified_base 21^22: mod_base = OTHER; note = Phosphorothioate bond
  modified_base 22: mod_base = cm
  modified_base 22^23: mod_base = OTHER; note = Phosphorothioate bond
  modified_base 23: mod_base = cm
ttttctgttaaattacaactacc

SEQ ID NO: 825 - RNA, 23 nt, synthetic construct
  source 1..23: mol_type = other RNA
  modified_base 1: mod_base = OTHER; note = 2'-O-methyl-adenosine
  modified_base 1^2: mod_base = OTHER; note = Phosphorothioate bond
  modified_base 2: mod_base = OTHER; note = 2'-Fluoro-cytidine
  modified_base 2^3: mod_base = OTHER; note = Phosphorothioate bond
  modified_base 3: mod_base = OTHER; note = 2'-O-methyl-adenosine
  modified_base 4: mod_base = um
  modified_base 5: mod_base = um
  modified_base 6: mod_base = OTHER; note = 2'-Fluoro-cytidine
  modified_base 7: mod_base = OTHER; note = 2'-O-methyl-adenosine
  modified_base 8: mod_base = gm
  modified_base 9: mod_base = OTHER; note = 2'-O-methyl-adenosine
  modified_base 10: mod_base = OTHER; note = 2'-O-methyl-adenosine
  modified_base 11: mod_base = OTHER; note = 2'-O-methyl-adenosine
  modified_base 12: mod_base = um
  modified_base 13: mod_base = cm
  modified_base 14: mod_base = OTHER; note = 2'-Fluoro-adenosine
  modified_base 15: mod_base = gm
  modified_base 16: mod_base = OTHER; note = 2'-Fluoro-adenosine
  modified_base 17: mod_base = cm
  modified_base 18: mod_base = OTHER; note = 2'-Fluoro-adenosine
  modified_base 19: mod_base = OTHER; note = 2'-O-methyl-adenosine
  modified_base 20: mod_base = um
  modified_base 21: mod_base = cm
  modified_base 21^22: mod_base = OTHER; note = Phosphorothioate bond
  modified_base 22: mod_base = um
  modified_base 22^23: mod_base = OTHER; note = Phosphorothioate bond
  modified_base 23: mod_base = gm
acattcagaaatcagacaatctg

SEQ ID NO: 826 - RNA, 23 nt, synthetic construct
  source 1..23: mol_type = other RNA
  modified_base 1: mod_base = um
  modified_base 1^2: mod_base = OTHER; note = Phosphorothioate bond
  modified_base 2: mod_base = OTHER; note = 2'-Fluoro-adenosine
  modified_base 2^3: mod_base = OTHER; note = Phosphorothioate bond
  modified_base 3: mod_base = OTHER; note = 2'-O-methyl-adenosine
  modified_base 4: mod_base = cm
  modified_base 5: mod_base = OTHER; note = 2'-O-methyl-adenosine
  modified_base 6: mod_base = OTHER; note = 2'-Fluoro-uridine
  modified_base 7: mod_base = um
  modified_base 8: mod_base = OTHER; note = 2'-O-methyl-adenosine
  modified_base 9: mod_base = OTHER; note = 2'-O-methyl-adenosine
  modified_base 10: mod_base = gm
  modified_base 11: mod_base = OTHER; note = 2'-O-methyl-adenosine
  modified_base 12: mod_base = OTHER; note = 2'-O-methyl-adenosine
  modified_base 13: mod_base = um
  modified_base 14: mod_base = OTHER; note = 2'-Fluoro-guanosine
  modified_base 15: mod_base = gm
  modified_base 16: mod_base = OTHER; note = 2'-Fluoro-uridine
  modified_base 17: mod_base = um
  modified_base 18: mod_base = OTHER; note = 2'-Fluoro-guanosine
  modified_base 19: mod_base = OTHER; note = 2'-O-methyl-adenosine
  modified_base 20: mod_base = OTHER; note = 2'-O-methyl-adenosine
  modified_base 21: mod_base = OTHER; note = 2'-O-methyl-adenosine
  modified_base 21^22: mod_base = OTHER; note = Phosphorothioate bond
  modified_base 22: mod_base = um
  modified_base 22^23: mod_base = OTHER; note = Phosphorothioate bond
  modified_base 23: mod_base = um
taacattaagaatggttgaaatt

SEQ ID NO: 827 - RNA, 23 nt, synthetic construct
  source 1..23: mol_type = other RNA
  modified_base 1: mod_base = OTHER; note = 2'-O-methyl-adenosine
  modified_base 1^2: mod_base = OTHER; note = Phosphorothioate bond
  modified_base 2: mod_base = OTHER; note = 2'-Fluoro-cytidine
  modified_base 2^3: mod_base = OTHER; note = Phosphorothioate bond
  modified_base 3: mod_base = OTHER; note = 2'-O-methyl-adenosine
  modified_base 4: mod_base = OTHER; note = 2'-O-methyl-adenosine
  modified_base 5: mod_base = cm
  modified_base 6: mod_base = OTHER; note = 2'-Fluoro-cytidine
  modified_base 7: mod_base = um
  modified_base 8: mod_base = gm
  modified_base 9: mod_base = OTHER; note = 2'-O-methyl-adenosine
  modified_base 10: mod_base = cm
  modified_base 11: mod_base = um
  modified_base 12: mod_base = gm
  modified_base 13: mod_base = cm
  modified_base 14: mod_base = OTHER; note = 2'-Fluoro-uridine
  modified_base 15: mod_base = gm
  modified_base 16: mod_base = OTHER; note = 2'-Fluoro-uridine
  modified_base 17: mod_base = um
  modified_base 18: mod_base = OTHER; note = 2'-Fluoro-adenosine
  modified_base 19: mod_base = um
  modified_base 20: mod_base = um
  modified_base 21: mod_base = um
  modified_base 21^22: mod_base = OTHER; note = Phosphorothioate bond
  modified_base 22: mod_base = OTHER; note = 2'-O-methyl-adenosine
  modified_base 22^23: mod_base = OTHER; note = Phosphorothioate bond
  modified_base 23: mod_base = cm
acaacctgactgctgttatttac

SEQ ID NO: 828 - RNA, 23 nt, synthetic construct
  source 1..23: mol_type = other RNA
  modified_base 1: mod_base = OTHER; note = 2'-O-methyl-adenosine
  modified_base 1^2: mod_base = OTHER; note = Phosphorothioate bond
  modified_base 2: mod_base = OTHER; note = 2'-Fluoro-adenosine
  modified_base 2^3: mod_base = OTHER; note = Phosphorothioate bond
  modified_base 3: mod_base = gm
  modified_base 4: mod_base = OTHER; note = 2'-O-methyl-adenosine
  modified_base 5: mod_base = OTHER; note = 2'-O-methyl-adenosine
  modified_base 6: mod_base = OTHER; note = 2'-Fluoro-cytidine
  modified_base 7: mod_base = cm
  modified_base 8: mod_base = OTHER; note = 2'-O-methyl-adenosine
  modified_base 9: mod_base = OTHER; note = 2'-O-methyl-adenosine
  modified_base 10: mod_base = gm
  modified_base 11: mod_base = um
  modified_base 12: mod_base = um
  modified_base 13: mod_base = OTHER; note = 2'-O-methyl-adenosine
  modified_base 14: mod_base = OTHER; note = 2'-Fluoro-guanosine
  modified_base 15: mod_base = cm
  modified_base 16: mod_base = OTHER; note = 2'-Fluoro-adenosine
  modified_base 17: mod_base = um
  modified_base 18: mod_base = OTHER; note = 2'-Fluoro-cytidine
  modified_base 19: mod_base = um
  modified_base 20: mod_base = gm
  modified_base 21: mod_base = OTHER; note = 2'-O-methyl-adenosine
  modified_base 21^22: mod_base = OTHER; note = Phosphorothioate bond
  modified_base 22: mod_base = gm
  modified_base 22^23: mod_base = OTHER; note = Phosphorothioate bond
  modified_base 23: mod_base = OTHER; note = 2'-O-methyl-adenosine
aagaaccaagttagcatctgaga

SEQ ID NO: 829 - RNA, 23 nt, synthetic construct
  source 1..23: mol_type = other RNA
  modified_base 1: mod_base = um
  modified_base 1^2: mod_base = OTHER; note = Phosphorothioate bond
  modified_base 2: mod_base = OTHER; note = 2'-Fluoro-guanosine
  modified_base 2^3: mod_base = OTHER; note = Phosphorothioate bond
  modified_base 3: mod_base = OTHER; note = 2'-O-methyl-adenosine
  modified_base 4: mod_base = gm
  modified_base 5: mod_base = um
  modified_base 6: mod_base = OTHER; note = 2'-Fluoro-uridine
  modified_base 7: mod_base = cm
  modified_base 8: mod_base = OTHER; note = 2'-O-methyl-adenosine
  modified_base 9: mod_base = OTHER; note = 2'-O-methyl-adenosine
  modified_base 10: mod_base = OTHER; note = 2'-O-methyl-adenosine
  modified_base 11: mod_base = cm
  modified_base 12: mod_base = cm
  modified_base 13: mod_base = OTHER; note = 2'-O-methyl-adenosine
  modified_base 14: mod_base = OTHER; note = 2'-Fluoro-uridine
  modified_base 15: mod_base = cm
  modified_base 16: mod_base = OTHER; note = 2'-Fluoro-adenosine
  modified_base 17: mod_base = gm
  modified_base 18: mod_base = OTHER; note = 2'-Fluoro-adenosine
  modified_base 19: mod_base = gm
  modified_base 20: mod_base = OTHER; note = 2'-O-methyl-adenosine
  modified_base 21: mod_base = gm
  modified_base 21^22: mod_base = OTHER; note = Phosphorothioate bond
  modified_base 22: mod_base = cm
  modified_base 22^23: mod_base = OTHER; note = Phosphorothioate bond
  modified_base 23: mod_base = OTHER; note = 2'-O-methyl-adenosine
tgagttcaaaccatcagagagca

SEQ ID NO: 830 - RNA, 23 nt, synthetic construct
  source 1..23: mol_type = other RNA
  modified_base 1: mod_base = um
  modified_base 1^2: mod_base = OTHER; note = Phosphorothioate bond
  modified_base 2: mod_base = OTHER; note = 2'-Fluoro-guanosine
  modified_base 2^3: mod_base = OTHER; note = Phosphorothioate bond
  modified_base 3: mod_base = OTHER; note = 2'-O-methyl-adenosine
  modified_base 4: mod_base = cm
  modified_base 5: mod_base = um
  modified_base 6: mod_base = OTHER; note = 2'-Fluoro-uridine
  modified_base 7: mod_base = OTHER; note = 2'-O-methyl-adenosine
  modified_base 8: mod_base = OTHER; note = 2'-O-methyl-adenosine
  modified_base 9: mod_base = cm
  modified_base 10: mod_base = OTHER; note = 2'-O-methyl-adenosine
  modified_base 11: mod_base = um
  modified_base 12: mod_base = um
  modified_base 13: mod_base = OTHER; note = 2'-O-methyl-adenosine
  modified_base 14: mod_base = OTHER; note = 2'-Fluoro-adenosine
  modified_base 15: mod_base = OTHER; note = 2'-O-methyl-adenosine
  modified_base 16: mod_base = OTHER; note = 2'-Fluoro-cytidine
  modified_base 17: mod_base = OTHER; note = 2'-O-methyl-adenosine
  modified_base 18: mod_base = OTHER; note = 2'-Fluoro-guanosine
  modified_base 19: mod_base = cm
  modified_base 20: mod_base = um
  modified_base 21: mod_base = OTHER; note = 2'-O-methyl-adenosine
  modified_base 21^22: mod_base = OTHER; note = Phosphorothioate bond
  modified_base 22: mod_base = um
  modified_base 22^23: mod_base = OTHER; note = Phosphorothioate bond
  modified_base 23: mod_base = gm
tgacttaacattaaacagctatg

SEQ ID NO: 831 - RNA, 23 nt, synthetic construct
  source 1..23: mol_type = other RNA
  modified_base 1: mod_base = um
  modified_base 1^2: mod_base = OTHER; note = Phosphorothioate bond
  modified_base 2: mod_base = OTHER; note = 2'-Fluoro-cytidine
  modified_base 2^3: mod_base = OTHER; note = Phosphorothioate bond
  modified_base 3: mod_base = cm
  modified_base 4: mod_base = OTHER; note = 2'-O-methyl-adenosine
  modified_base 5: mod_base = OTHER; note = 2'-O-methyl-adenosine
  modified_base 6: mod_base = OTHER; note = 2'-Fluoro-adenosine
  modified_base 7: mod_base = OTHER; note = 2'-O-methyl-adenosine
  modified_base 8: mod_base = um
  modified_base 9: mod_base = OTHER; note = 2'-O-methyl-adenosine
  modified_base 10: mod_base = cm
  modified_base 11: mod_base = um
  modified_base 12: mod_base = gm
  modified_base 13: mod_base = OTHER; note = 2'-O-methyl-adenosine
  modified_base 14: mod_base = OTHER; note = 2'-Fluoro-adenosine
  modified_base 15: mod_base = cm
  modified_base 16: mod_base = OTHER; note = 2'-Fluoro-adenosine
  modified_base 17: mod_base = um
  modified_base 18: mod_base = OTHER; note = 2'-Fluoro-adenosine
  modified_base 19: mod_base = OTHER; note = 2'-O-methyl-adenosine
  modified_base 20: mod_base = gm
  modified_base 21: mod_base = gm
  modified_base 21^22: mod_base = OTHER; note = Phosphorothioate bond
  modified_base 22: mod_base = um
  modified_base 22^23: mod_base = OTHER; note = Phosphorothioate bond
  modified_base 23: mod_base = OTHER; note = 2'-O-methyl-adenosine
tccaaaatactgaacataaggta

SEQ ID NO: 832 - RNA, 23 nt, synthetic construct
  source 1..23: mol_type = other RNA
  modified_base 1: mod_base = OTHER; note = 2'-O-methyl-adenosine
  modified_base 1^2: mod_base = OTHER; note = Phosphorothioate bond
  modified_base 2: mod_base = OTHER; note = 2'-Fluoro-adenosine
  modified_base 2^3: mod_base = OTHER; note = Phosphorothioate bond
  modified_base 3: mod_base = gm
  modified_base 4: mod_base = cm
  modified_base 5: mod_base = OTHER; note = 2'-O-methyl-adenosine
  modified_base 6: mod_base = OTHER; note = 2'-Fluoro-guanosine
  modified_base 7: mod_base = um
  modified_base 8: mod_base = OTHER; note = 2'-O-methyl-adenosine
  modified_base 9: mod_base = OTHER; note = 2'-O-methyl-adenosine
  modified_base 10: mod_base = OTHER; note = 2'-O-methyl-adenosine
  modified_base 11: mod_base = gm
  modified_base 12: mod_base = gm
  modified_base 13: mod_base = cm
  modified_base 14: mod_base = OTHER; note = 2'-Fluoro-adenosine
  modified_base 15: mod_base = cm
  modified_base 16: mod_base = OTHER; note = 2'-Fluoro-adenosine
  modified_base 17: mod_base = gm
  modified_base 18: mod_base = OTHER; note = 2'-Fluoro-adenosine
  modified_base 19: mod_base = um
  modified_base 20: mod_base = OTHER; note = 2'-O-methyl-adenosine
  modified_base 21: mod_base = OTHER; note = 2'-O-methyl-adenosine
  modified_base 21^22: mod_base = OTHER; note = Phosphorothioate bond
  modified_base 22: mod_base = gm
  modified_base 22^23: mod_base = OTHER; note = Phosphorothioate bond
  modified_base 23: mod_base = OTHER; note = 2'-O-methyl-adenosine
aagcagtaaaggcacagataaga

SEQ ID NO: 833 - RNA, 23 nt, synthetic construct
  source 1..23: mol_type = other RNA
  modified_base 1: mod_base = OTHER; note = 2'-O-methyl-adenosine
  modified_base 1^2: mod_base = OTHER; note = Phosphorothioate bond
  modified_base 2: mod_base = OTHER; note = 2'-Fluoro-guanosine
  modified_base 2^3: mod_base = OTHER; note = Phosphorothioate bond
  modified_base 3: mod_base = um
  modified_base 4: mod_base = um
  modified_base 5: mod_base = um
  modified_base 6: mod_base = OTHER; note = 2'-Fluoro-uridine
  modified_base 7: mod_base = OTHER; note = 2'-O-methyl-adenosine
  modified_base 8: mod_base = OTHER; note = 2'-O-methyl-adenosine
  modified_base 9: mod_base = OTHER; note = 2'-O-methyl-adenosine
  modified_base 10: mod_base = OTHER; note = 2'-O-methyl-adenosine
  modified_base 11: mod_base = um
  modified_base 12: mod_base = cm
  modified_base 13: mod_base = cm
  modified_base 14: mod_base = OTHER; note = 2'-Fluoro-uridine
  modified_base 15: mod_base = um
  modified_base 16: mod_base = OTHER; note = 2'-Fluoro-uridine
  modified_base 17: mod_base = um
  modified_base 18: mod_base = OTHER; note = 2'-Fluoro-guanosine
  modified_base 19: mod_base = cm
  modified_base 20: mod_base = um
  modified_base 21: mod_base = OTHER; note = 2'-O-methyl-adenosine
  modified_base 21^22: mod_base = OTHER; note = Phosphorothioate bond
  modified_base 22: mod_base = OTHER; note = 2'-O-methyl-adenosine
  modified_base 22^23: mod_base = OTHER; note = Phosphorothioate bond
  modified_base 23: mod_base = gm
agttttaaaatccttttgctaag

SEQ ID NO: 834 - RNA, 23 nt, synthetic construct
  source 1..23: mol_type = other RNA
  modified_base 1: mod_base = gm
  modified_base 1^2: mod_base = OTHER; note = Phosphorothioate bond
  modified_base 2: mod_base = OTHER; note = 2'-Fluoro-adenosine
  modified_base 2^3: mod_base = OTHER; note = Phosphorothioate bond
  modified_base 3: mod_base = OTHER; note = 2'-O-methyl-adenosine
  modified_base 4: mod_base = cm
  modified_base 5: mod_base = cm
  modified_base 6: mod_base = OTHER; note = 2'-Fluoro-adenosine
  modified_base 7: mod_base = OTHER; note = 2'-O-methyl-adenosine
  modified_base 8: mod_base = gm
  modified_base 9: mod_base = um
  modified_base 10: mod_base = um
  modified_base 11: mod_base = OTHER; note = 2'-O-methyl-adenosine
  modified_base 12: mod_base = gm
  modified_base 13: mod_base = cm
  modified_base 14: mod_base = OTHER; note = 2'-Fluoro-adenosine
  modified_base 15: mod_base = um
  modified_base 16: mod_base = OTHER; note = 2'-Fluoro-cytidine
  modified_base 17: mod_base = um
  modified_base 18: mod_base = OTHER; note = 2'-Fluoro-guanosine
  modified_base 19: mod_base = OTHER; note = 2'-O-methyl-adenosine
  modified_base 20: mod_base = gm
  modified_base 21: mod_base = OTHER; note = 2'-O-methyl-adenosine
  modified_base 21^22: mod_base = OTHER; note = Phosphorothioate bond
  modified_base 22: mod_base = um
  modified_base 22^23: mod_base = OTHER; note = Phosphorothioate bond
  modified_base 23: mod_base = gm
gaaccaagttagcatctgagatg

SEQ ID NO: 835 - RNA, 23 nt, synthetic construct
  source 1..23: mol_type = other RNA
  modified_base 1: mod_base = OTHER; note = 2'-O-methyl-adenosine
  modified_base 1^2: mod_base = OTHER; note = Phosphorothioate bond
  modified_base 2: mod_base = OTHER; note = 2'-Fluoro-adenosine
  modified_base 2^3: mod_base = OTHER; note = Phosphorothioate bond
  modified_base 3: mod_base = OTHER; note = 2'-O-methyl-adenosine
  modified_base 4: mod_base = OTHER; note = 2'-O-methyl-adenosine
  modified_base 5: mod_base = gm
  modified_base 6: mod_base = OTHER; note = 2'-Fluoro-adenosine
  modified_base 7: mod_base = cm
  modified_base 8: mod_base = OTHER; note = 2'-O-methyl-adenosine
  modified_base 9: mod_base = um
  modified_base 10: mod_base = OTHER; note = 2'-O-methyl-adenosine
  modified_base 11: mod_base = um
  modified_base 12: mod_base = gm
  modified_base 13: mod_base = cm
  modified_base 14: mod_base = OTHER; note = 2'-Fluoro-adenosine
  modified_base 15: mod_base = cm
  modified_base 16: mod_base = OTHER; note = 2'-Fluoro-adenosine
  modified_base 17: mod_base = gm
  modified_base 18: mod_base = OTHER; note = 2'-Fluoro-uridine
  modified_base 19: mod_base = gm
  modified_base 20: mod_base = OTHER; note = 2'-O-methyl-adenosine
  modified_base 21: mod_base = um
  modified_base 21^22: mod_base = OTHER; note = Phosphorothioate bond
  modified_base 22: mod_base = um
  modified_base 22^23: mod_base = OTHER; note = Phosphorothioate bond
  modified_base 23: mod_base = gm
aaaagacatatgcacagtgattg

SEQ ID NO: 836 - RNA, 23 nt, synthetic construct
  source 1..23: mol_type = other RNA
  modified_base 1: mod_base = OTHER; note = 2'-O-methyl-adenosine
  modified_base 1^2: mod_base = OTHER; note = Phosphorothioate bond
  modified_base 2: mod_base = OTHER; note = 2'-Fluoro-adenosine
  modified_base 2^3: mod_base = OTHER; note = Phosphorothioate bond
  modified_base 3: mod_base = cm
  modified_base 4: mod_base = OTHER; note = 2'-O-methyl-adenosine
  modified_base 5: mod_base = gm
  modified_base 6: mod_base = OTHER; note = 2'-Fluoro-cytidine
  modified_base 7: mod_base = um
  modified_base 8: mod_base = OTHER; note = 2'-O-methyl-adenosine
  modified_base 9: mod_base = um
  modified_base 10: mod_base = gm
  modified_base 11: mod_base = cm
  modified_base 12: mod_base = OTHER; note = 2'-O-methyl-adenosine
  modified_base 13: mod_base = OTHER; note = 2'-O-methyl-adenosine
  modified_base 14: mod_base = OTHER; note = 2'-Fluoro-adenosine
  modified_base 15: mod_base = um
  modified_base 16: mod_base = OTHER; note = 2'-Fluoro-uridine
  modified_base 17: mod_base = um
  modified_base 18: mod_base = OTHER; note = 2'-Fluoro-guanosine
  modified_base 19: mod_base = gm
  modified_base 20: mod_base = OTHER; note = 2'-O-methyl-adenosine
  modified_base 21: mod_base = um
  modified_base 21^22: mod_base = OTHER; note = Phosphorothioate bond
  modified_base 22: mod_base = cm
  modified_base 22^23: mod_base = OTHER; note = Phosphorothioate bond
  modified_base 23: mod_base = OTHER; note = 2'-O-methyl-adenosine
aacagctatgcaaatttggatca

SEQ ID NO: 837 - RNA, 23 nt, synthetic construct
  source 1..23: mol_type = other RNA
  modified_base 1: mod_base = OTHER; note = 2'-O-methyl-adenosine
  modified_base 1^2: mod_base = OTHER; note = Phosphorothioate bond
  modified_base 2: mod_base = OTHER; note = 2'-Fluoro-uridine
  modified_base 2^3: mod_base = OTHER; note = Phosphorothioate bond
  modified_base 3: mod_base = cm
  modified_base 4: mod_base = cm
  modified_base 5: mod_base = OTHER; note = 2'-O-methyl-adenosine
  modified_base 6: mod_base = OTHER; note = 2'-Fluoro-adenosine
  modified_base 7: mod_base = um
  modified_base 8: mod_base = um
  modified_base 9: mod_base = um
  modified_base 10: mod_base = um
  modified_base 11: mod_base = OTHER; note = 2'-O-methyl-adenosine
  modified_base 12: mod_base = gm
  modified_base 13: mod_base = cm
  modified_base 14: mod_base = OTHER; note = 2'-Fluoro-adenosine
  modified_base 15: mod_base = gm
  modified_base 16: mod_base = OTHER; note = 2'-Fluoro-cytidine
  modified_base 17: mod_base = OTHER; note = 2'-O-methyl-adenosine
  modified_base 18: mod_base = OTHER; note = 2'-Fluoro-cytidine
  modified_base 19: mod_base = um
  modified_base 20: mod_base = cm
  modified_base 21: mod_base = um
  modified_base 21^22: mod_base = OTHER; note = Phosphorothioate bond
  modified_base 22: mod_base = cm
  modified_base 22^23: mod_base = OTHER; note = Phosphorothioate bond
  modified_base 23: mod_base = cm
atccaattttagcagcactctcc

SEQ ID NO: 838 - RNA, 23 nt, synthetic construct
  source 1..23: mol_type = other RNA
  modified_base 1: mod_base = OTHER; note = 2'-O-methyl-adenosine
  modified_base 1^2: mod_base = OTHER; note = Phosphorothioate bond
  modified_base 2: mod_base = OTHER; note = 2'-Fluoro-guanosine
  modified_base 2^3: mod_base = OTHER; note = Phosphorothioate bond
  modified_base 3: mod_base = cm
  modified_base 4: mod_base = um
  modified_base 5: mod_base = OTHER; note = 2'-O-methyl-adenosine
  modified_base 6: mod_base = OTHER; note = 2'-Fluoro-uridine
  modified_base 7: mod_base = gm
  modified_base 8: mod_base = cm
  modified_base 9: mod_base = OTHER; note = 2'-O-methyl-adenosine
  modified_base 10: mod_base = OTHER; note = 2'-O-methyl-adenosine
  modified_base 11: mod_base = OTHER; note = 2'-O-methyl-adenosine
  modified_base 12: mod_base = um
  modified_base 13: mod_base = um
  modified_base 14: mod_base = OTHER; note = 2'-Fluoro-uridine
  modified_base 15: mod_base = gm
  modified_base 16: mod_base = OTHER; note = 2'-Fluoro-guanosine
  modified_base 17: mod_base = OTHER; note = 2'-O-methyl-adenosine
  modified_base 18: mod_base = OTHER; note = 2'-Fluoro-uridine
  modified_base 19: mod_base = cm
  modified_base 20: mod_base = OTHER; note = 2'-O-methyl-adenosine
  modified_base 21: mod_base = OTHER; note = 2'-O-methyl-adenosine
  modified_base 21^22: mod_base = OTHER; note = Phosphorothioate bond
  modified_base 22: mod_base = cm
  modified_base 22^23: mod_base = OTHER; note = Phosphorothioate bond
  modified_base 23: mod_base = OTHER; note = 2'-O-methyl-adenosine
agctatgcaaatttggatcaaca

SEQ ID NO: 839 - RNA, 23 nt, synthetic construct
  source 1..23: mol_type = other RNA
  modified_base 1: mod_base = um
  modified_base 1^2: mod_base = OTHER; note = Phosphorothioate bond
  modified_base 2: mod_base = OTHER; note = 2'-Fluoro-adenosine
  modified_base 2^3: mod_base = OTHER; note = Phosphorothioate bond
  modified_base 3: mod_base = cm
  modified_base 4: mod_base = OTHER; note = 2'-O-methyl-adenosine
  modified_base 5: mod_base = gm
  modified_base 6: mod_base = OTHER; note = 2'-Fluoro-uridine
  modified_base 7: mod_base = um
  modified_base 8: mod_base = cm
  modified_base 9: mod_base = um
  modified_base 10: mod_base = gm
  modified_base 11: mod_base = um
  modified_base 12: mod_base = um
  modified_base 13: mod_base = um
  modified_base 14: mod_base = OTHER; note = 2'-Fluoro-uridine
  modified_base 15: mod_base = gm
  modified_base 16: mod_base = OTHER; note = 2'-Fluoro-adenosine
  modified_base 17: mod_base = OTHER; note = 2'-O-methyl-adenosine
  modified_base 18: mod_base = OTHER; note = 2'-Fluoro-cytidine
  modified_base 19: mod_base = OTHER; note = 2'-O-methyl-adenosine
  modified_base 20: mod_base = cm
  modified_base 21: mod_base = cm
  modified_base 21^22: mod_base = OTHER; note = Phosphorothioate bond
  modified_base 22: mod_base = OTHER; note = 2'-O-methyl-adenosine
  modified_base 22^23: mod_base = OTHER; note = Phosphorothioate bond
  modified_base 23: mod_base = OTHER; note = 2'-O-methyl-adenosine
tacagttctgttttgaacaccaa

SEQ ID NO: 840 - RNA, 23 nt, synthetic construct
  source 1..23: mol_type = other RNA
  modified_base 1: mod_base = um
  modified_base 1^2: mod_base = OTHER; note = Phosphorothioate bond
  modified_base 2: mod_base = OTHER; note = 2'-Fluoro-cytidine
  modified_base 2^3: mod_base = OTHER; note = Phosphorothioate bond
  modified_base 3: mod_base = OTHER; note = 2'-O-methyl-adenosine
  modified_base 4: mod_base = um
  modified_base 5: mod_base = gm
  modified_base 6: mod_base = OTHER; note = 2'-Fluoro-adenosine
  modified_base 7: mod_base = cm
  modified_base 8: mod_base = um
  modified_base 9: mod_base = um
  modified_base 10: mod_base = OTHER; note = 2'-O-methyl-adenosine
  modified_base 11: mod_base = OTHER; note = 2'-O-methyl-adenosine
  modified_base 12: mod_base = cm
  modified_base 13: mod_base = OTHER; note = 2'-O-methyl-adenosine
  modified_base 14: mod_base = OTHER; note = 2'-Fluoro-uridine
  modified_base 15: mod_base = um
  modified_base 16: mod_base = OTHER; note = 2'-Fluoro-adenosine
  modified_base 17: mod_base = OTHER; note = 2'-O-methyl-adenosine
  modified_base 18: mod_base = OTHER; note = 2'-Fluoro-adenosine
  modified_base 19: mod_base = cm
  modified_base 20: mod_base = OTHER; note = 2'-O-methyl-adenosine
  modified_base 21: mod_base = gm
  modified_base 21^22: mod_base = OTHER; note = Phosphorothioate bond
  modified_base 22: mod_base = cm
  modified_base 22^23: mod_base = OTHER; note = Phosphorothioate bond
  modified_base 23: mod_base = um
tcatgacttaacattaaacagct

SEQ ID NO: 841 - RNA, 23 nt, synthetic construct
  source 1..23: mol_type = other RNA
  modified_base 1: mod_base = um
  modified_base 1^2: mod_base = OTHER; note = Phosphorothioate bond
  modified_base 2: mod_base = OTHER; note = 2'-Fluoro-guanosine
  modified_base 2^3: mod_base = OTHER; note = Phosphorothioate bond
  modified_base 3: mod_base = OTHER; note = 2'-O-methyl-adenosine
  modified_base 4: mod_base = OTHER; note = 2'-O-methyl-adenosine
  modified_base 5: mod_base = OTHER; note = 2'-O-methyl-adenosine
  modified_base 6: mod_base = OTHER; note = 2'-Fluoro-adenosine
  modified_base 7: mod_base = cm
  modified_base 8: mod_base = cm
  modified_base 9: mod_base = um
  modified_base 10: mod_base = gm
  modified_base 11: mod_base = OTHER; note = 2'-O-methyl-adenosine
  modified_base 12: mod_base = gm
  modified_base 13: mod_base = gm
  modified_base 14: mod_base = OTHER; note = 2'-Fluoro-uridine
  modified_base 15: mod_base = gm
  modified_base 16: mod_base = OTHER; note = 2'-Fluoro-guanosine
  modified_base 17: mod_base = OTHER; note = 2'-O-methyl-adenosine
  modified_base 18: mod_base = OTHER; note = 2'-Fluoro-adenosine
  modified_base 19: mod_base = cm
  modified_base 20: mod_base = OTHER; note = 2'-O-methyl-adenosine
  modified_base 21: mod_base = gm
  modified_base 21^22: mod_base = OTHER; note = Phosphorothioate bond
  modified_base 22: mod_base = gm
  modified_base 22^23: mod_base = OTHER; note = Phosphorothioate bond
  modified_base 23: mod_base = OTHER; note = 2'-O-methyl-adenosine
tgaaaacctgaggtggaacagga

SEQ ID NO: 842 - RNA, 23 nt, synthetic construct
  source 1..23: mol_type = other RNA
  modified_base 1: mod_base = gm
  modified_base 1^2: mod_base = OTHER; note = Phosphorothioate bond
  modified_base 2: mod_base = OTHER; note = 2'-Fluoro-uridine
  modified_base 2^3: mod_base = OTHER; note = Phosphorothioate bond
  modified_base 3: mod_base = OTHER; note = 2'-O-methyl-adenosine
  modified_base 4: mod_base = OTHER; note = 2'-O-methyl-adenosine
  modified_base 5: mod_base = cm
  modified_base 6: mod_base = OTHER; note = 2'-Fluoro-adenosine
  modified_base 7: mod_base = um
  modified_base 8: mod_base = um
  modified_base 9: mod_base = OTHER; note = 2'-O-methyl-adenosine
  modified_base 10: mod_base = OTHER; note = 2'-O-methyl-adenosine
  modified_base 11: mod_base = gm
  modified_base 12: mod_base = OTHER; note = 2'-O-methyl-adenosine
  modified_base 13: mod_base = OTHER; note = 2'-O-methyl-adenosine
  modified_base 14: mod_base = OTHER; note = 2'-Fluoro-uridine
  modified_base 15: mod_base = gm
  modified_base 16: mod_base = OTHER; note = 2'-Fluoro-guanosine
  modified_base 17: mod_base = um
  modified_base 18: mod_base = OTHER; note = 2'-Fluoro-uridine
  modified_base 19: mod_base = gm
  modified_base 20: mod_base = OTHER; note = 2'-O-methyl-adenosine
  modified_base 21: mod_base = OTHER; note = 2'-O-methyl-adenosine
  modified_base 21^22: mod_base = OTHER; note = Phosphorothioate bond
  modified_base 22: mod_base = OTHER; note = 2'-O-methyl-adenosine
  modified_base 22^23: mod_base = OTHER; note = Phosphorothioate bond
  modified_base 23: mod_base = um
gtaacattaagaatggttgaaat

SEQ ID NO: 843 - RNA, 23 nt, synthetic construct
  source 1..23: mol_type = other RNA
  modified_base 1: mod_base = um
  modified_base 1^2: mod_base = OTHER; note = Phosphorothioate bond
  modified_base 2: mod_base = OTHER; note = 2'-Fluoro-cytidine
  modified_base 2^3: mod_base = OTHER; note = Phosphorothioate bond
  modified_base 3: mod_base = OTHER; note = 2'-O-methyl-adenosine
  modified_base 4: mod_base = gm
  modified_base 5: mod_base = OTHER; note = 2'-O-methyl-adenosine
  modified_base 6: mod_base = OTHER; note = 2'-Fluoro-adenosine
  modified_base 7: mod_base = OTHER; note = 2'-O-methyl-adenosine
  modified_base 8: mod_base = um
  modified_base 9: mod_base = cm
  modified_base 10: mod_base = OTHER; note = 2'-O-methyl-adenosine
  modified_base 11: mod_base = gm
  modified_base 12: mod_base = OTHER; note = 2'-O-methyl-adenosine
  modified_base 13: mod_base = cm
  modified_base 14: mod_base = OTHER; note = 2'-Fluoro-adenosine
  modified_base 15: mod_base = OTHER; note = 2'-O-methyl-adenosine
  modified_base 16: mod_base = OTHER; note = 2'-Fluoro-uridine
  modified_base 17: mod_base = cm
  modified_base 18: mod_base = OTHER; note = 2'-Fluoro-uridine
  modified_base 19: mod_base = gm
  modified_base 20: mod_base = gm
  modified_base 21: mod_base = OTHER; note = 2'-O-methyl-adenosine
  modified_base 21^22: mod_base = OTHER; note = Phosphorothioate bond
  modified_base 22: mod_base = gm
  modified_base 22^23: mod_base = OTHER; note = Phosphorothioate bond
  modified_base 23: mod_base = OTHER; note = 2'-O-methyl-adenosine
tcagaaatcagacaatctggaga

SEQ ID NO: 844 - RNA, 23 nt, synthetic construct
  source 1..23: mol_type = other RNA
  modified_base 1: mod_base = OTHER; note = 2'-O-methyl-adenosine
  modified_base 1^2: mod_base = OTHER; note = Phosphorothioate bond
  modified_base 2: mod_base = OTHER; note = 2'-Fluoro-guanosine
  modified_base 2^3: mod_base = OTHER; note = Phosphorothioate bond
  modified_base 3: mod_base = OTHER; note = 2'-O-methyl-adenosine
  modified_base 4: mod_base = OTHER; note = 2'-O-methyl-adenosine
  modified_base 5: mod_base = cm
  modified_base 6: mod_base = OTHER; note = 2'-Fluoro-cytidine
  modified_base 7: mod_base = OTHER; note = 2'-O-methyl-adenosine
  modified_base 8: mod_base = OTHER; note = 2'-O-methyl-adenosine
  modified_base 9: mod_base = gm
  modified_base 10: mod_base = um
  modified_base 11: mod_base = um
  modified_base 12: mod_base = OTHER; note = 2'-O-methyl-adenosine
  modified_base 13: mod_base = gm
  modified_base 14: mod_base = OTHER; note = 2'-Fluoro-cytidine
  modified_base 15: mod_base = OTHER; note = 2'-O-methyl-adenosine
  modified_base 16: mod_base = OTHER; note = 2'-Fluoro-uridine
  modified_base 17: mod_base = cm
  modified_base 18: mod_base = OTHER; note = 2'-Fluoro-uridine
  modified_base 19: mod_base = gm
  modified_base 20: mod_base = OTHER; note = 2'-O-methyl-adenosine
  modified_base 21: mod_base = gm
  modified_base 21^22: mod_base = OTHER; note = Phosphorothioate bond
  modified_base 22: mod_base = OTHER; note = 2'-O-methyl-adenosine
  modified_base 22^23: mod_base = OTHER; note = Phosphorothioate bond
  modified_base 23: mod_base = um
agaaccaagttagcatctgagat

SEQ ID NO: 845 - RNA, 23 nt, synthetic construct
  source 1..23: mol_type = other RNA
  modified_base 1: mod_base = OTHER; note = 2'-O-methyl-adenosine
  modified_base 1^2: mod_base = OTHER; note = Phosphorothioate bond
  modified_base 2: mod_base = OTHER; note = 2'-Fluoro-adenosine
  modified_base 2^3: mod_base = OTHER; note = Phosphorothioate bond
  modified_base 3: mod_base = um
  modified_base 4: mod_base = OTHER; note = 2'-O-methyl-adenosine
  modified_base 5: mod_base = cm
  modified_base 6: mod_base = OTHER; note = 2'-Fluoro-uridine
  modified_base 7: mod_base = gm
  modified_base 8: mod_base = OTHER; note = 2'-O-methyl-adenosine
  modified_base 9: mod_base = OTHER; note = 2'-O-methyl-adenosine
  modified_base 10: mod_base = cm
  modified_base 11: mod_base = OTHER; note = 2'-O-methyl-adenosine
  modified_base 12: mod_base = um
  modified_base 13: mod_base = OTHER; note = 2'-O-methyl-adenosine
  modified_base 14: mod_base = OTHER; note = 2'-Fluoro-adenosine
  modified_base 15: mod_base = gm
  modified_base 16: mod_base = OTHER; note = 2'-Fluoro-guanosine
  modified_base 17: mod_base = um
  modified_base 18: mod_base = OTHER; note = 2'-Fluoro-adenosine
  modified_base 19: mod_base = gm
  modified_base 20: mod_base = gm
  modified_base 21: mod_base = cm
  modified_base 21^22: mod_base = OTHER; note = Phosphorothioate bond
  modified_base 22: mod_base = um
  modified_base 22^23: mod_base = OTHER; note = Phosphorothioate bond
  modified_base 23: mod_base = gm
aatactgaacataaggtaggctg

SEQ ID NO: 846 - RNA, 23 nt, synthetic construct
  source 1..23: mol_type = other RNA
  modified_base 1: mod_base = um
  modified_base 1^2: mod_base = OTHER; note = Phosphorothioate bond
  modified_base 2: mod_base = OTHER; note = 2'-Fluoro-guanosine
  modified_base 2^3: mod_base = OTHER; note = Phosphorothioate bond
  modified_base 3: mod_base = um
  modified_base 4: mod_base = cm
  modified_base 5: mod_base = OTHER; note = 2'-O-methyl-adenosine
  modified_base 6: mod_base = OTHER; note = 2'-Fluoro-uridine
  modified_base 7: mod_base = gm
  modified_base 8: mod_base = OTHER; note = 2'-O-methyl-adenosine
  modified_base 9: mod_base = cm
  modified_base 10: mod_base = um
  modified_base 11: mod_base = um
  modified_base 12: mod_base = OTHER; note = 2'-O-methyl-adenosine
  modified_base 13: mod_base = OTHER; note = 2'-O-methyl-adenosine
  modified_base 14: mod_base = OTHER; note = 2'-Fluoro-cytidine
  modified_base 15: mod_base = OTHER; note = 2'-O-methyl-adenosine
  modified_base 16: mod_base = OTHER; note = 2'-Fluoro-uridine
  modified_base 17: mod_base = um
  modified_base 18: mod_base = OTHER; note = 2'-Fluoro-adenosine
  modified_base 19: mod_base = OTHER; note = 2'-O-methyl-adenosine
  modified_base 20: mod_base = OTHER; note = 2'-O-methyl-adenosine
  modified_base 21: mod_base = cm
  modified_base 21^22: mod_base = OTHER; note = Phosphorothioate bond
  modified_base 22: mod_base = OTHER; note = 2'-O-methyl-adenosine
  modified_base 22^23: mod_base = OTHER; note = Phosphorothioate bond
  modified_base 23: mod_base = gm
tgtcatgacttaacattaaacag

SEQ ID NO: 847 - RNA, 23 nt, synthetic construct
  source 1..23: mol_type = other RNA
  modified_base 1: mod_base = OTHER; note = 2'-O-methyl-adenosine
  modified_base 1^2: mod_base = OTHER; note = Phosphorothioate bond
  modified_base 2: mod_base = OTHER; note = 2'-Fluoro-adenosine
  modified_base 2^3: mod_base = OTHER; note = Phosphorothioate bond
  modified_base 3: mod_base = cm
  modified_base 4: mod_base = OTHER; note = 2'-O-methyl-adenosine
  modified_base 5: mod_base = um
  modified_base 6: mod_base = OTHER; note = 2'-Fluoro-uridine
  modified_base 7: mod_base = OTHER; note = 2'-O-methyl-adenosine
  modified_base 8: mod_base = OTHER; note = 2'-O-methyl-adenosine
  modified_base 9: mod_base = OTHER; note = 2'-O-methyl-adenosine
  modified_base 10: mod_base = cm
  modified_base 11: mod_base = OTHER; note = 2'-O-methyl-adenosine
  modified_base 12: mod_base = gm
  modified_base 13: mod_base = cm
  modified_base 14: mod_base = OTHER; note = 2'-Fluoro-uridine
  modified_base 15: mod_base = OTHER; note = 2'-O-methyl-adenosine
  modified_base 16: mod_base = OTHER; note = 2'-Fluoro-uridine
  modified_base 17: mod_base = gm
  modified_base 18: mod_base = OTHER; note = 2'-Fluoro-cytidine
  modified_base 19: mod_base = OTHER; note = 2'-O-methyl-adenosine
  modified_base 20: mod_base = OTHER; note = 2'-O-methyl-adenosine
  modified_base 21: mod_base = OTHER; note = 2'-O-methyl-adenosine
  modified_base 21^22: mod_base = OTHER; note = Phosphorothioate bond
  modified_base 22: mod_base = um
  modified_base 22^23: mod_base = OTHER; note = Phosphorothioate bond
  modified_base 23: mod_base = um
aacattaaacagctatgcaaatt

SEQ ID NO: 848 - RNA, 23 nt, synthetic construct
  source 1..23: mol_type = other RNA
  modified_base 1: mod_base = OTHER; note = 2'-O-methyl-adenosine
  modified_base 1^2: mod_base = OTHER; note = Phosphorothioate bond
  modified_base 2: mod_base = OTHER; note = 2'-Fluoro-uridine
  modified_base 2^3: mod_base = OTHER; note = Phosphorothioate bond
  modified_base 3: mod_base = um
  modified_base 4: mod_base = cm
  modified_base 5: mod_base = OTHER; note = 2'-O-methyl-adenosine
  modified_base 6: mod_base = OTHER; note = 2'-Fluoro-guanosine
  modified_base 7: mod_base = OTHER; note = 2'-O-methyl-adenosine
  modified_base 8: mod_base = OTHER; note = 2'-O-methyl-adenosine
  modified_base 9: mod_base = OTHER; note = 2'-O-methyl-adenosine
  modified_base 10: mod_base = um
  modified_base 11: mod_base = cm
  modified_base 12: mod_base = OTHER; note = 2'-O-methyl-adenosine
  modified_base 13: mod_base = gm
  modified_base 14: mod_base = OTHER; note = 2'-Fluoro-adenosine
  modified_base 15: mod_base = cm
  modified_base 16: mod_base = OTHER; note = 2'-Fluoro-adenosine
  modified_base 17: mod_base = OTHER; note = 2'-O-methyl-adenosine
  modified_base 18: mod_base = OTHER; note = 2'-Fluoro-uridine
  modified_base 19: mod_base = cm
  modified_base 20: mod_base = um
  modified_base 21: mod_base = gm
  modified_base 21^22: mod_base = OTHER; note = Phosphorothioate bond
  modified_base 22: mod_base = gm
  modified_base 22^23: mod_base = OTHER; note = Phosphorothioate bond
  modified_base 23: mod_base = OTHER; note = 2'-O-methyl-adenosine
attcagaaatcagacaatctgga

SEQ ID NO: 849 - RNA, 23 nt, synthetic construct
  source 1..23: mol_type = other RNA
  modified_base 1: mod_base = OTHER; note = 2'-O-methyl-adenosine
  modified_base 1^2: mod_base = OTHER; note = Phosphorothioate bond
  modified_base 2: mod_base = OTHER; note = 2'-Fluoro-cytidine
  modified_base 2^3: mod_base = OTHER; note = Phosphorothioate bond
  modified_base 3: mod_base = OTHER; note = 2'-O-methyl-adenosine
  modified_base 4: mod_base = OTHER; note = 2'-O-methyl-adenosine
  modified_base 5: mod_base = OTHER; note = 2'-O-methyl-adenosine
  modified_base 6: mod_base = OTHER; note = 2'-Fluoro-adenosine
  modified_base 7: mod_base = um
  modified_base 8: mod_base = cm
  modified_base 9: mod_base = OTHER; note = 2'-O-methyl-adenosine
  modified_base 10: mod_base = OTHER; note = 2'-O-methyl-adenosine
  modified_base 11: mod_base = gm
  modified_base 12: mod_base = cm
  modified_base 13: mod_base = um
  modified_base 14: mod_base = OTHER; note = 2'-Fluoro-adenosine
  modified_base 15: mod_base = gm
  modified_base 16: mod_base = OTHER; note = 2'-Fluoro-adenosine
  modified_base 17: mod_base = um
  modified_base 18: mod_base = OTHER; note = 2'-Fluoro-cytidine
  modified_base 19: mod_base = OTHER; note = 2'-O-methyl-adenosine
  modified_base 20: mod_base = um
  modified_base 21: mod_base = OTHER; note = 2'-O-methyl-adenosine
  modified_base 21^22: mod_base = OTHER; note = Phosphorothioate bond
  modified_base 22: mod_base = OTHER; note = 2'-O-methyl-adenosine
  modified_base 22^23: mod_base = OTHER; note = Phosphorothioate bond
  modified_base 23: mod_base = um
acaaaatcaagctagatcataat

SEQ ID NO: 850 - RNA, 23 nt, synthetic construct
  source 1..23: mol_type = other RNA
  modified_base 1: mod_base = OTHER; note = 2'-O-methyl-adenosine
  modified_base 1^2: mod_base = OTHER; note = Phosphorothioate bond
  modified_base 2: mod_base = OTHER; note = 2'-Fluoro-cytidine
  modified_base 2^3: mod_base = OTHER; note = Phosphorothioate bond
  modified_base 3: mod_base = OTHER; note = 2'-O-methyl-adenosine
  modified_base 4: mod_base = gm
  modified_base 5: mod_base = cm
  modified_base 6: mod_base = OTHER; note = 2'-Fluoro-uridine
  modified_base 7: mod_base = OTHER; note = 2'-O-methyl-adenosine
  modified_base 8: mod_base = um
  modified_base 9: mod_base = gm
  modified_base 10: mod_base = cm
  modified_base 11: mod_base = OTHER; note = 2'-O-methyl-adenosine
  modified_base 12: mod_base = OTHER; note = 2'-O-methyl-adenosine
  modified_base 13: mod_base = OTHER; note = 2'-O-methyl-adenosine
  modified_base 14: mod_base = OTHER; note = 2'-Fluoro-uridine
  modified_base 15: mod_base = um
  modified_base 16: mod_base = OTHER; note = 2'-Fluoro-uridine
  modified_base 17: mod_base = gm
  modified_base 18: mod_base = OTHER; note = 2'-Fluoro-guanosine
  modified_base 19: mod_base = OTHER; note = 2'-O-methyl-adenosine
  modified_base 20: mod_base = um
  modified_base 21: mod_base = cm
  modified_base 21^22: mod_base = OTHER; note = Phosphorothioate bond
  modified_base 22: mod_base = OTHER; note = 2'-O-methyl-adenosine
  modified_base 22^23: mod_base = OTHER; note = Phosphorothioate bond
  modified_base 23: mod_base = OTHER; note = 2'-O-methyl-adenosine
acagctatgcaaatttggatcaa

SEQ ID NO: 851 - RNA, 23 nt, synthetic construct
  source 1..23: mol_type = other RNA
  modified_base 1: mod_base = um
  modified_base 1^2: mod_base = OTHER; note = Phosphorothioate bond
  modified_base 2: mod_base = OTHER; note = 2'-Fluoro-adenosine
  modified_base 2^3: mod_base = OTHER; note = Phosphorothioate bond
  modified_base 3: mod_base = cm
  modified_base 4: mod_base = OTHER; note = 2'-O-methyl-adenosine
  modified_base 5: mod_base = um
  modified_base 6: mod_base = OTHER; note = 2'-Fluoro-uridine
  modified_base 7: mod_base = cm
  modified_base 8: mod_base = OTHER; note = 2'-O-methyl-adenosine
  modified_base 9: mod_base = gm
  modified_base 10: mod_base = OTHER; note = 2'-O-methyl-adenosine
  modified_base 11: mod_base = OTHER; note = 2'-O-methyl-adenosine
  modified_base 12: mod_base = OTHER; note = 2'-O-methyl-adenosine
  modified_base 13: mod_base = um
  modified_base 14: mod_base = OTHER; note = 2'-Fluoro-cytidine
  modified_base 15: mod_base = OTHER; note = 2'-O-methyl-adenosine
  modified_base 16: mod_base = OTHER; note = 2'-Fluoro-guanosine
  modified_base 17: mod_base = OTHER; note = 2'-O-methyl-adenosine
  modified_base 18: mod_base = OTHER; note = 2'-Fluoro-cytidine
  modified_base 19: mod_base = OTHER; note = 2'-O-methyl-adenosine
  modified_base 20: mod_base = OTHER; note = 2'-O-methyl-adenosine
  modified_base 21: mod_base = um
  modified_base 21^22: mod_base = OTHER; note = Phosphorothioate bond
  modified_base 22: mod_base = cm
  modified_base 22^23: mod_base = OTHER; note = Phosphorothioate bond
  modified_base 23: mod_base = um
tacattcagaaatcagacaatct

SEQ ID NO: 852 - RNA, 23 nt, synthetic construct
  source 1..23: mol_type = other RNA
  modified_base 1: mod_base = um
  modified_base 1^2: mod_base = OTHER; note = Phosphorothioate bond
  modified_base 2: mod_base = OTHER; note = 2'-Fluoro-uridine
  modified_base 2^3: mod_base = OTHER; note = Phosphorothioate bond
  modified_base 3: mod_base = OTHER; note = 2'-O-methyl-adenosine
  modified_base 4: mod_base = OTHER; note = 2'-O-methyl-adenosine
  modified_base 5: mod_base = cm
  modified_base 6: mod_base = OTHER; note = 2'-Fluoro-adenosine
  modified_base 7: mod_base = um
  modified_base 8: mod_base = um
  modified_base 9: mod_base = OTHER; note = 2'-O-methyl-adenosine
  modified_base 10: mod_base = OTHER; note = 2'-O-methyl-adenosine
  modified_base 11: mod_base = OTHER; note = 2'-O-methyl-adenosine
  modified_base 12: mod_base = cm
  modified_base 13: mod_base = OTHER; note = 2'-O-methyl-adenosine
  modified_base 14: mod_base = OTHER; note = 2'-Fluoro-guanosine
  modified_base 15: mod_base = cm
  modified_base 16: mod_base = OTHER; note = 2'-Fluoro-uridine
  modified_base 17: mod_base = OTHER; note = 2'-O-methyl-adenosine
  modified_base 18: mod_base = OTHER; note = 2'-Fluoro-uridine
  modified_base 19: mod_base = gm
  modified_base 20: mod_base = cm
  modified_base 21: mod_base = OTHER; note = 2'-O-methyl-adenosine
  modified_base 21^22: mod_base = OTHER; note = Phosphorothioate bond
  modified_base 22: mod_base = OTHER; note = 2'-O-methyl-adenosine
  modified_base 22^23: mod_base = OTHER; note = Phosphorothioate bond
  modified_base 23: mod_base = OTHER; note = 2'-O-methyl-adenosine
ttaacattaaacagctatgcaaa

SEQ ID NO: 853 - RNA, 23 nt, synthetic construct
  source 1..23: mol_type = other RNA
  modified_base 1: mod_base = OTHER; note = 2'-O-methyl-adenosine
  modified_base 1^2: mod_base = OTHER; note = Phosphorothioate bond
  modified_base 2: mod_base = OTHER; note = 2'-Fluoro-adenosine
  modified_base 2^3: mod_base = OTHER; note = Phosphorothioate bond
  modified_base 3: mod_base = um
  modified_base 4: mod_base = cm
  modified_base 5: mod_base = OTHER; note = 2'-O-methyl-adenosine
  modified_base 6: mod_base = OTHER; note = 2'-Fluoro-adenosine
  modified_base 7: mod_base = gm
  modified_base 8: mod_base = cm
  modified_base 9: mod_base = um
  modified_base 10: mod_base = OTHER; note = 2'-O-methyl-adenosine
  modified_base 11: mod_base = gm
  modified_base 12: mod_base = OTHER; note = 2'-O-methyl-adenosine
  modified_base 13: mod_base = um
  modified_base 14: mod_base = OTHER; note = 2'-Fluoro-cytidine
  modified_base 15: mod_base = OTHER; note = 2'-O-methyl-adenosine
  modified_base 16: mod_base = OTHER; note = 2'-Fluoro-uridine
  modified_base 17: mod_base = OTHER; note = 2'-O-methyl-adenosine
  modified_base 18: mod_base = OTHER; note = 2'-Fluoro-adenosine
  modified_base 19: mod_base = um
  modified_base 20: mod_base = um
  modified_base 21: mod_base = OTHER; note = 2'-O-methyl-adenosine
  modified_base 21^22: mod_base = OTHER; note = Phosphorothioate bond
  modified_base 22: mod_base = gm
  modified_base 22^23: mod_base = OTHER; note = Phosphorothioate bond
  modified_base 23: mod_base = OTHER; note = 2'-O-methyl-adenosine
aatcaagctagatcataattaga

SEQ ID NO: 854 - RNA, 23 nt, synthetic construct
  source 1..23: mol_type = other RNA
  modified_base 1: mod_base = gm
  modified_base 1^2: mod_base = OTHER; note = Phosphorothioate bond
  modified_base 2: mod_base = OTHER; note = 2'-Fluoro-uridine
  modified_base 2^3: mod_base = OTHER; note = Phosphorothioate bond
  modified_base 3: mod_base = OTHER; note = 2'-O-methyl-adenosine
  modified_base 4: mod_base = OTHER; note = 2'-O-methyl-adenosine
  modified_base 5: mod_base = OTHER; note = 2'-O-methyl-adenosine
  modified_base 6: mod_base = OTHER; note = 2'-Fluoro-cytidine
  modified_base 7: mod_base = OTHER; note = 2'-O-methyl-adenosine
  modified_base 8: mod_base = OTHER; note = 2'-O-methyl-adenosine
  modified_base 9: mod_base = cm
  modified_base 10: mod_base = cm
  modified_base 11: mod_base = um
  modified_base 12: mod_base = gm
  modified_base 13: mod_base = OTHER; note = 2'-O-methyl-adenosine
  modified_base 14: mod_base = OTHER; note = 2'-Fluoro-cytidine
  modified_base 15: mod_base = um
  modified_base 16: mod_base = OTHER; note = 2'-Fluoro-guanosine
  modified_base 17: mod_base = cm
  modified_base 18: mod_base = OTHER; note = 2'-Fluoro-uridine
  modified_base 19: mod_base = gm
  modified_base 20: mod_base = um
  modified_base 21: mod_base = um
  modified_base 21^22: mod_base = OTHER; note = Phosphorothioate bond
  modified_base 22: mod_base = OTHER; note = 2'-O-methyl-adenosine
  modified_base 22^23: mod_base = OTHER; note = Phosphorothioate bond
  modified_base 23: mod_base = um
gtaaacaacctgactgctgttat

SEQ ID NO: 855 - RNA, 23 nt, synthetic construct
  source 1..23: mol_type = other RNA
  modified_base 1: mod_base = um
  modified_base 1^2: mod_base = OTHER; note = Phosphorothioate bond
  modified_base 2: mod_base = OTHER; note = 2'-Fluoro-uridine
  modified_base 2^3: mod_base = OTHER; note = Phosphorothioate bond
  modified_base 3: mod_base = cm
  modified_base 4: mod_base = OTHER; note = 2'-O-methyl-adenosine
  modified_base 5: mod_base = gm
  modified_base 6: mod_base = OTHER; note = 2'-Fluoro-adenosine
  modified_base 7: mod_base = OTHER; note = 2'-O-methyl-adenosine
  modified_base 8: mod_base = OTHER; note = 2'-O-methyl-adenosine
  modified_base 9: mod_base = um
  modified_base 10: mod_base = cm
  modified_base 11: mod_base = OTHER; note = 2'-O-methyl-adenosine
  modified_base 12: mod_base = gm
  modified_base 13: mod_base = OTHER; note = 2'-O-methyl-adenosine
  modified_base 14: mod_base = OTHER; note = 2'-Fluoro-cytidine
  modified_base 15: mod_base = OTHER; note = 2'-O-methyl-adenosine
  modified_base 16: mod_base = OTHER; note = 2'-Fluoro-adenosine
  modified_base 17: mod_base = um
  modified_base 18: mod_base = OTHER; note = 2'-Fluoro-cytidine
  modified_base 19: mod_base = um
  modified_base 20: mod_base = gm
  modified_base 21: mod_base = gm
  modified_base 21^22: mod_base = OTHER; note = Phosphorothioate bond
  modified_base 22: mod_base = OTHER; note = 2'-O-methyl-adenosine
  modified_base 22^23: mod_base = OTHER; note = Phosphorothioate bond
  modified_base 23: mod_base = gm
ttcagaaatcagacaatctggag

SEQ ID NO: 856 - RNA, 23 nt, synthetic construct
  source 1..23: mol_type = other RNA
  modified_base 1: mod_base = OTHER; note = 2'-O-methyl-adenosine
  modified_base 1^2: mod_base = OTHER; note = Phosphorothioate bond
  modified_base 2: mod_base = OTHER; note = 2'-Fluoro-cytidine
  modified_base 2^3: mod_base = OTHER; note = Phosphorothioate bond
  modified_base 3: mod_base = um
  modified_base 4: mod_base = um
  modified_base 5: mod_base = OTHER; note = 2'-O-methyl-adenosine
  modified_base 6: mod_base = OTHER; note = 2'-Fluoro-adenosine
  modified_base 7: mod_base = cm
  modified_base 8: mod_base = OTHER; note = 2'-O-methyl-adenosine
  modified_base 9: mod_base = um
  modified_base 10: mod_base = um
  modified_base 11: mod_base = OTHER; note = 2'-O-methyl-adenosine
  modified_base 12: mod_base = OTHER; note = 2'-O-methyl-adenosine
  modified_base 13: mod_base = OTHER; note = 2'-O-methyl-adenosine
  modified_base 14: mod_base = OTHER; note = 2'-Fluoro-cytidine
  modified_base 15: mod_base = OTHER; note = 2'-O-methyl-adenosine
  modified_base 16: mod_base = OTHER; note = 2'-Fluoro-guanosine
  modified_base 17: mod_base = cm
  modified_base 18: mod_base = OTHER; note = 2'-Fluoro-uridine
  modified_base 19: mod_base = OTHER; note = 2'-O-methyl-adenosine
  modified_base 20: mod_base = um
  modified_base 21: mod_base = gm
  modified_base 21^22: mod_base = OTHER; note = Phosphorothioate bond
  modified_base 22: mod_base = cm
  modified_base 22^23: mod_base = OTHER; note = Phosphorothioate bond
  modified_base 23: mod_base = OTHER; note = 2'-O-methyl-adenosine
acttaacattaaacagctatgca

SEQ ID NO: 857 - RNA, 23 nt, synthetic construct
  source 1..23: mol_type = other RNA
  modified_base 1: mod_base = OTHER; note = 2'-O-methyl-adenosine
  modified_base 1^2: mod_base = OTHER; note = Phosphorothioate bond
  modified_base 2: mod_base = OTHER; note = 2'-Fluoro-adenosine
  modified_base 2^3: mod_base = OTHER; note = Phosphorothioate bond
  modified_base 3: mod_base = OTHER; note = 2'-O-methyl-adenosine
  modified_base 4: mod_base = um
  modified_base 5: mod_base = cm
  modified_base 6: mod_base = OTHER; note = 2'-Fluoro-adenosine
  modified_base 7: mod_base = OTHER; note = 2'-O-methyl-adenosine
  modified_base 8: mod_base = gm
  modified_base 9: mod_base = cm
  modified_base 10: mod_base = um
  modified_base 11: mod_base = OTHER; note = 2'-O-methyl-adenosine
  modified_base 12: mod_base = gm
  modified_base 13: mod_base = OTHER; note = 2'-O-methyl-adenosine
  modified_base 14: mod_base = OTHER; note = 2'-Fluoro-uridine
  modified_base 15: mod_base = cm
  modified_base 16: mod_base = OTHER; note = 2'-Fluoro-adenosine
  modified_base 17: mod_base = um
  modified_base 18: mod_base = OTHER; note = 2'-Fluoro-adenosine
  modified_base 19: mod_base = OTHER; note = 2'-O-methyl-adenosine
  modified_base 20: mod_base = um
  modified_base 21: mod_base = um
  modified_base 21^22: mod_base = OTHER; note = Phosphorothioate bond
  modified_base 22: mod_base = OTHER; note = 2'-O-methyl-adenosine
  modified_base 22^23: mod_base = OTHER; note = Phosphorothioate bond
  modified_base 23: mod_base = gm
aaatcaagctagatcataattag

SEQ ID NO: 858 - RNA, 23 nt, synthetic construct
  source 1..23: mol_type = other RNA
  modified_base 1: mod_base = cm
  modified_base 1^2: mod_base = OTHER; note = Phosphorothioate bond
  modified_base 2: mod_base = OTHER; note = 2'-Fluoro-adenosine
  modified_base 2^3: mod_base = OTHER; note = Phosphorothioate bond
  modified_base 3: mod_base = OTHER; note = 2'-O-methyl-adenosine
  modified_base 4: mod_base = OTHER; note = 2'-O-methyl-adenosine
  modified_base 5: mod_base = OTHER; note = 2'-O-methyl-adenosine
  modified_base 6: mod_base = OTHER; note = 2'-Fluoro-uridine
  modified_base 7: mod_base = OTHER; note = 2'-O-methyl-adenosine
  modified_base 8: mod_base = cm
  modified_base 9: mod_base = um
  modified_base 10: mod_base = gm
  modified_base 11: mod_base = OTHER; note = 2'-O-methyl-adenosine
  modified_base 12: mod_base = OTHER; note = 2'-O-methyl-adenosine
  modified_base 13: mod_base = cm
  modified_base 14: mod_base = OTHER; note = 2'-Fluoro-adenosine
  modified_base 15: mod_base = um
  modified_base 16: mod_base = OTHER; note = 2'-Fluoro-adenosine
  modified_base 17: mod_base = OTHER; note = 2'-O-methyl-adenosine
  modified_base 18: mod_base = OTHER; note = 2'-Fluoro-guanosine
  modified_base 19: mod_base = gm
  modified_base 20: mod_base = um
  modified_base 21: mod_base = OTHER; note = 2'-O-methyl-adenosine
  modified_base 21^22: mod_base = OTHER; note = Phosphorothioate bond
  modified_base 22: mod_base = gm
  modified_base 22^23: mod_base = OTHER; note = Phosphorothioate bond
  modified_base 23: mod_base = gm
caaaatactgaacataaggtagg

SEQ ID NO: 859 - RNA, 23 nt, synthetic construct
  source 1..23: mol_type = other RNA
  modified_base 1: mod_base = OTHER; note = 2'-O-methyl-adenosine
  modified_base 1^2: mod_base = OTHER; note = Phosphorothioate bond
  modified_base 2: mod_base = OTHER; note = 2'-Fluoro-guanosine
  modified_base 2^3: mod_base = OTHER; note = Phosphorothioate bond
  modified_base 3: mod_base = cm
  modified_base 4: mod_base = OTHER; note = 2'-O-methyl-adenosine
  modified_base 5: mod_base = gm
  modified_base 6: mod_base = OTHER; note = 2'-Fluoro-adenosine
  modified_base 7: mod_base = gm
  modified_base 8: mod_base = OTHER; note = 2'-O-methyl-adenosine
  modified_base 9: mod_base = cm
  modified_base 10: mod_base = OTHER; note = 2'-O-methyl-adenosine
  modified_base 11: mod_base = cm
  modified_base 12: mod_base = cm
  modified_base 13: mod_base = um
  modified_base 14: mod_base = OTHER; note = 2'-Fluoro-cytidine
  modified_base 15: mod_base = cm
  modified_base 16: mod_base = OTHER; note = 2'-Fluoro-adenosine
  modified_base 17: mod_base = OTHER; note = 2'-O-methyl-adenosine
  modified_base 18: mod_base = OTHER; note = 2'-Fluoro-adenosine
  modified_base 19: mod_base = OTHER; note = 2'-O-methyl-adenosine
  modified_base 20: mod_base = um
  modified_base 21: mod_base = OTHER; note = 2'-O-methyl-adenosine
  modified_base 21^22: mod_base = OTHER; note = Phosphorothioate bond
  modified_base 22: mod_base = cm
  modified_base 22^23: mod_base = OTHER; note = Phosphorothioate bond
  modified_base 23: mod_base = um
agcagagacacctccaaaatact

SEQ ID NO: 860 - RNA, 23 nt, synthetic construct
  source 1..23: mol_type = other RNA
  modified_base 1: mod_base = um
  modified_base 1^2: mod_base = OTHER; note = Phosphorothioate bond
  modified_base 2: mod_base = OTHER; note = 2'-Fluoro-uridine
  modified_base 2^3: mod_base = OTHER; note = Phosphorothioate bond
  modified_base 3: mod_base = OTHER; note = 2'-O-methyl-adenosine
  modified_base 4: mod_base = OTHER; note = 2'-O-methyl-adenosine
  modified_base 5: mod_base = gm
  modified_base 6: mod_base = OTHER; note = 2'-Fluoro-guanosine
  modified_base 7: mod_base = cm
  modified_base 8: mod_base = OTHER; note = 2'-O-methyl-adenosine
  modified_base 9: mod_base = cm
  modified_base 10: mod_base = um
  modified_base 11: mod_base = um
  modified_base 12: mod_base = um
  modified_base 13: mod_base = gm
  modified_base 14: mod_base = OTHER; note = 2'-Fluoro-guanosine
  modified_base 15: mod_base = OTHER; note = 2'-O-methyl-adenosine
  modified_base 16: mod_base = OTHER; note = 2'-Fluoro-adenosine
  modified_base 17: mod_base = OTHER; note = 2'-O-methyl-adenosine
  modified_base 18: mod_base = OTHER; note = 2'-Fluoro-adenosine
  modified_base 19: mod_base = gm
  modified_base 20: mod_base = um
  modified_base 21: mod_base = cm
  modified_base 21^22: mod_base = OTHER; note = Phosphorothioate bond
  modified_base 22: mod_base = OTHER; note = 2'-O-methyl-adenosine
  modified_base 22^23: mod_base = OTHER; note = Phosphorothioate bond
  modified_base 23: mod_base = gm
ttaaggcactttggaaaagtcag

SEQ ID NO: 861 - RNA, 23 nt, synthetic construct
  source 1..23: mol_type = other RNA
  modified_base 1: mod_base = cm
  modified_base 1^2: mod_base = OTHER; note = Phosphorothioate bond
  modified_base 2: mod_base = OTHER; note = 2'-Fluoro-adenosine
  modified_base 2^3: mod_base = OTHER; note = Phosphorothioate bond
  modified_base 3: mod_base = gm
  modified_base 4: mod_base = OTHER; note = 2'-O-methyl-adenosine
  modified_base 5: mod_base = gm
  modified_base 6: mod_base = OTHER; note = 2'-Fluoro-adenosine
  modified_base 7: mod_base = cm
  modified_base 8: mod_base = OTHER; note = 2'-O-methyl-adenosine
  modified_base 9: mod_base = cm
  modified_base 10: mod_base = cm
  modified_base 11: mod_base = um
  modified_base 12: mod_base = cm
  modified_base 13: mod_base = cm
  modified_base 14: mod_base = OTHER; note = 2'-Fluoro-adenosine
  modified_base 15: mod_base = OTHER; note = 2'-O-methyl-adenosine
  modified_base 16: mod_base = OTHER; note = 2'-Fluoro-adenosine
  modified_base 17: mod_base = OTHER; note = 2'-O-methyl-adenosine
  modified_base 18: mod_base = OTHER; note = 2'-Fluoro-uridine
  modified_base 19: mod_base = OTHER; note = 2'-O-methyl-adenosine
  modified_base 20: mod_base = cm
  modified_base 21: mod_base = um
  modified_base 21^22: mod_base = OTHER; note = Phosphorothioate bond
  modified_base 22: mod_base = gm
  modified_base 22^23: mod_base = OTHER; note = Phosphorothioate bond
  modified_base 23: mod_base = OTHER; note = 2'-O-methyl-adenosine
cagagacacctccaaaatactga

SEQ ID NO: 862 - RNA, 23 nt, synthetic construct
  source 1..23: mol_type = other RNA
  modified_base 1: mod_base = um
  modified_base 1^2: mod_base = OTHER; note = Phosphorothioate bond
  modified_base 2: mod_base = OTHER; note = 2'-Fluoro-uridine
  modified_base 2^3: mod_base = OTHER; note = Phosphorothioate bond
  modified_base 3: mod_base = um
  modified_base 4: mod_base = OTHER; note = 2'-O-methyl-adenosine
  modified_base 5: mod_base = OTHER; note = 2'-O-methyl-adenosine
  modified_base 6: mod_base = OTHER; note = 2'-Fluoro-guanosine
  modified_base 7: mod_base = gm
  modified_base 8: mod_base = cm
  modified_base 9: mod_base = OTHER; note = 2'-O-methyl-adenosine
  modified_base 10: mod_base = cm
  modified_base 11: mod_base = um
  modified_base 12: mod_base = um
  modified_base 13: mod_base = um
  modified_base 14: mod_base = OTHER; note = 2'-Fluoro-guanosine
  modified_base 15: mod_base = gm
  modified_base 16: mod_base = OTHER; note = 2'-Fluoro-adenosine
  modified_base 17: mod_base = OTHER; note = 2'-O-methyl-adenosine
  modified_base 18: mod_base = OTHER; note = 2'-Fluoro-adenosine
  modified_base 19: mod_base = OTHER; note = 2'-O-methyl-adenosine
  modified_base 20: mod_base = gm
  modified_base 21: mod_base = um
  modified_base 21^22: mod_base = OTHER; note = Phosphorothioate bond
  modified_base 22: mod_base = cm
  modified_base 22^23: mod_base = OTHER; note = Phosphorothioate bond
  modified_base 23: mod_base = OTHER; note = 2'-O-methyl-adenosine
tttaaggcactttggaaaagtca

SEQ ID NO: 863 - RNA, 23 nt, synthetic construct
  source 1..23: mol_type = other RNA
  modified_base 1: mod_base = gm
  modified_base 1^2: mod_base = OTHER; note = Phosphorothioate bond
  modified_base 2: mod_base = OTHER; note = 2'-Fluoro-cytidine
  modified_base 2^3: mod_base = OTHER; note = Phosphorothioate bond
  modified_base 3: mod_base = OTHER; note = 2'-O-methyl-adenosine
  modified_base 4: mod_base = gm
  modified_base 5: mod_base = OTHER; note = 2'-O-methyl-adenosine
  modified_base 6: mod_base = OTHER; note = 2'-Fluoro-guanosine
  modified_base 7: mod_base = OTHER; note = 2'-O-methyl-adenosine
  modified_base 8: mod_base = cm
  modified_base 9: mod_base = OTHER; note = 2'-O-methyl-adenosine
  modified_base 10: mod_base = cm
  modified_base 11: mod_base = cm
  modified_base 12: mod_base = um
  modified_base 13: mod_base = cm
  modified_base 14: mod_base = OTHER; note = 2'-Fluoro-cytidine
  modified_base 15: mod_base = OTHER; note = 2'-O-methyl-adenosine
  modified_base 16: mod_base = OTHER; note = 2'-Fluoro-adenosine
  modified_base 17: mod_base = OTHER; note = 2'-O-methyl-adenosine
  modified_base 18: mod_base = OTHER; note = 2'-Fluoro-adenosine
  modified_base 19: mod_base = um
  modified_base 20: mod_base = OTHER; note = 2'-O-methyl-adenosine
  modified_base 21: mod_base = cm
  modified_base 21^22: mod_base = OTHER; note = Phosphorothioate bond
  modified_base 22: mod_base = um
  modified_base 22^23: mod_base = OTHER; note = Phosphorothioate bond
  modified_base 23: mod_base = gm
gcagagacacctccaaaatactg

SEQ ID NO: 864 - RNA, 23 nt, synthetic construct
  source 1..23: mol_type = other RNA
  modified_base 1: mod_base = um
  modified_base 1^2: mod_base = OTHER; note = Phosphorothioate bond
  modified_base 2: mod_base = OTHER; note = 2'-Fluoro-cytidine
  modified_base 2^3: mod_base = OTHER; note = Phosphorothioate bond
  modified_base 3: mod_base = cm
  modified_base 4: mod_base = cm
  modified_base 5: mod_base = gm
  modified_base 6: mod_base = OTHER; note = 2'-Fluoro-adenosine
  modified_base 7: mod_base = um
  modified_base 8: mod_base = gm
  modified_base 9: mod_base = um
  modified_base 10: mod_base = cm
  modified_base 11: mod_base = cm
  modified_base 12: mod_base = OTHER; note = 2'-O-methyl-adenosine
  modified_base 13: mod_base = cm
  modified_base 14: mod_base = OTHER; note = 2'-Fluoro-uridine
  modified_base 15: mod_base = gm
  modified_base 16: mod_base = OTHER; note = 2'-Fluoro-uridine
  modified_base 17: mod_base = gm
  modified_base 18: mod_base = OTHER; note = 2'-Fluoro-adenosine
  modified_base 19: mod_base = um
  modified_base 20: mod_base = um
  modified_base 21: mod_base = um
  modified_base 21^22: mod_base = OTHER; note = Phosphorothioate bond
  modified_base 22: mod_base = gm
  modified_base 22^23: mod_base = OTHER; note = Phosphorothioate bond
  modified_base 23: mod_base = gm
tcccgatgtccactgtgatttgg

SEQ ID NO: 865 - RNA, 23 nt, synthetic construct
  source 1..23: mol_type = other RNA
  modified_base 1: mod_base = um
  modified_base 1^2: mod_base = OTHER; note = Phosphorothioate bond
  modified_base 2: mod_base = OTHER; note = 2'-Fluoro-guanosine
  modified_base 2^3: mod_base = OTHER; note = Phosphorothioate bond
  modified_base 3: mod_base = um
  modified_base 4: mod_base = cm
  modified_base 5: mod_base = cm
  modified_base 6: mod_base = OTHER; note = 2'-Fluoro-cytidine
  modified_base 7: mod_base = gm
  modified_base 8: mod_base = OTHER; note = 2'-O-methyl-adenosine
  modified_base 9: mod_base = um
  modified_base 10: mod_base = gm
  modified_base 11: mod_base = um
  modified_base 12: mod_base = cm
  modified_base 13: mod_base = cm
  modified_base 14: mod_base = OTHER; note = 2'-Fluoro-adenosine
  modified_base 15: mod_base = cm
  modified_base 16: mod_base = OTHER; note = 2'-Fluoro-uridine
  modified_base 17: mod_base = gm
  modified_base 18: mod_base = OTHER; note = 2'-Fluoro-uridine
  modified_base 19: mod_base = gm
  modified_base 20: mod_base = OTHER; note = 2'-O-methyl-adenosine
  modified_base 21: mod_base = um
  modified_base 21^22: mod_base = OTHER; note = Phosphorothioate bond
  modified_base 22: mod_base = um
  modified_base 22^23: mod_base = OTHER; note = Phosphorothioate bond
  modified_base 23: mod_base = um
tgtcccgatgtccactgtgattt

SEQ ID NO: 866 - RNA, 23 nt, synthetic construct
  source 1..23: mol_type = other RNA
  modified_base 1: mod_base = OTHER; note = 2'-O-methyl-adenosine
  modified_base 1^2: mod_base = OTHER; note = Phosphorothioate bond
  modified_base 2: mod_base = OTHER; note = 2'-Fluoro-guanosine
  modified_base 2^3: mod_base = OTHER; note = Phosphorothioate bond
  modified_base 3: mod_base = cm
  modified_base 4: mod_base = OTHER; note = 2'-O-methyl-adenosine
  modified_base 5: mod_base = gm
  modified_base 6: mod_base = OTHER; note = 2'-Fluoro-cytidine
  modified_base 7: mod_base = gm
  modified_base 8: mod_base = gm
  modified_base 9: mod_base = gm
  modified_base 10: mod_base = gm
  modified_base 11: mod_base = OTHER; note = 2'-O-methyl-adenosine
  modified_base 12: mod_base = cm
  modified_base 13: mod_base = um
  modified_base 14: mod_base = OTHER; note = 2'-Fluoro-cytidine
  modified_base 15: mod_base = cm
  modified_base 16: mod_base = OTHER; note = 2'-Fluoro-uridine
  modified_base 17: mod_base = cm
  modified_base 18: mod_base = OTHER; note = 2'-Fluoro-adenosine
  modified_base 19: mod_base = gm
  modified_base 20: mod_base = gm
  modified_base 21: mod_base = gm
  modified_base 21^22: mod_base = OTHER; note = Phosphorothioate bond
  modified_base 22: mod_base = cm
  modified_base 22^23: mod_base = OTHER; note = Phosphorothioate bond
  modified_base 23: mod_base = OTHER; note = 2'-O-methyl-adenosine
agcagcggggactcctcagggca

SEQ ID NO: 867 - RNA, 23 nt, synthetic construct
  source 1..23: mol_type = other RNA
  modified_base 1: mod_base = OTHER; note = 2'-O-methyl-adenosine
  modified_base 1^2: mod_base = OTHER; note = Phosphorothioate bond
  modified_base 2: mod_base = OTHER; note = 2'-Fluoro-cytidine
  modified_base 2^3: mod_base = OTHER; note = Phosphorothioate bond
  modified_base 3: mod_base = gm
  modified_base 4: mod_base = OTHER; note = 2'-O-methyl-adenosine
  modified_base 5: mod_base = gm
  modified_base 6: mod_base = OTHER; note = 2'-Fluoro-cytidine
  modified_base 7: mod_base = OTHER; note = 2'-O-methyl-adenosine
  modified_base 8: mod_base = gm
  modified_base 9: mod_base = gm
  modified_base 10: mod_base = cm
  modified_base 11: mod_base = gm
  modified_base 12: mod_base = gm
  modified_base 13: mod_base = cm
  modified_base 14: mod_base = OTHER; note = 2'-Fluoro-adenosine
  modified_base 15: mod_base = gm
  modified_base 16: mod_base = OTHER; note = 2'-Fluoro-guanosine
  modified_base 17: mod_base = cm
  modified_base 18: mod_base = OTHER; note = 2'-Fluoro-cytidine
  modified_base 19: mod_base = cm
  modified_base 20: mod_base = gm
  modified_base 21: mod_base = cm
  modified_base 21^22: mod_base = OTHER; note = Phosphorothioate bond
  modified_base 22: mod_base = um
  modified_base 22^23: mod_base = OTHER; note = Phosphorothioate bond
  modified_base 23: mod_base = gm
acgagcaggcggcaggcccgctg

SEQ ID NO: 868 - RNA, 23 nt, synthetic construct
  source 1..23: mol_type = other RNA
  modified_base 1: mod_base = cm
  modified_base 1^2: mod_base = OTHER; note = Phosphorothioate bond
  modified_base 2: mod_base = OTHER; note = 2'-Fluoro-guanosine
  modified_base 2^3: mod_base = OTHER; note = Phosphorothioate bond
  modified_base 3: mod_base = OTHER; note = 2'-O-methyl-adenosine
  modified_base 4: mod_base = um
  modified_base 5: mod_base = gm
  modified_base 6: mod_base = OTHER; note = 2'-Fluoro-uridine
  modified_base 7: mod_base = cm
  modified_base 8: mod_base = cm
  modified_base 9: mod_base = OTHER; note = 2'-O-methyl-adenosine
  modified_base 10: mod_base = cm
  modified_base 11: mod_base = um
  modified_base 12: mod_base = gm
  modified_base 13: mod_base = um
  modified_base 14: mod_base = OTHER; note = 2'-Fluoro-guanosine
  modified_base 15: mod_base = OTHER; note = 2'-O-methyl-adenosine
  modified_base 16: mod_base = OTHER; note = 2'-Fluoro-uridine
  modified_base 17: mod_base = um
  modified_base 18: mod_base = OTHER; note = 2'-Fluoro-uridine
  modified_base 19: mod_base = gm
  modified_base 20: mod_base = gm
  modified_base 21: mod_base = gm
  modified_base 21^22: mod_base = OTHER; note = Phosphorothioate bond
  modified_base 22: mod_base = um
  modified_base 22^23: mod_base = OTHER; note = Phosphorothioate bond
  modified_base 23: mod_base = OTHER; note = 2'-O-methyl-adenosine
cgatgtccactgtgatttgggta

SEQ ID NO: 869 - RNA, 23 nt, synthetic construct
  source 1..23: mol_type = other RNA
  modified_base 1: mod_base = cm
  modified_base 1^2: mod_base = OTHER; note = Phosphorothioate bond
  modified_base 2: mod_base = OTHER; note = 2'-Fluoro-cytidine
  modified_base 2^3: mod_base = OTHER; note = Phosphorothioate bond
  modified_base 3: mod_base = cm
  modified_base 4: mod_base = gm
  modified_base 5: mod_base = OTHER; note = 2'-O-methyl-adenosine
  modified_base 6: mod_base = OTHER; note = 2'-Fluoro-uridine
  modified_base 7: mod_base = gm
  modified_base 8: mod_base = um
  modified_base 9: mod_base = cm
  modified_base 10: mod_base = cm
  modified_base 11: mod_base = OTHER; note = 2'-O-methyl-adenosine
  modified_base 12: mod_base = cm
  modified_base 13: mod_base = um
  modified_base 14: mod_base = OTHER; note = 2'-Fluoro-guanosine
  modified_base 15: mod_base = um
  modified_base 16: mod_base = OTHER; note = 2'-Fluoro-guanosine
  modified_base 17: mod_base = OTHER; note = 2'-O-methyl-adenosine
  modified_base 18: mod_base = OTHER; note = 2'-Fluoro-uridine
  modified_base 19: mod_base = um
  modified_base 20: mod_base = um
  modified_base 21: mod_base = gm
  modified_base 21^22: mod_base = OTHER; note = Phosphorothioate bond
  modified_base 22: mod_base = gm
  modified_base 22^23: mod_base = OTHER; note = Phosphorothioate bond
  modified_base 23: mod_base = gm
cccgatgtccactgtgatttggg

SEQ ID NO: 870 - RNA, 23 nt, synthetic construct
  source 1..23: mol_type = other RNA
  modified_base 1: mod_base = um
  modified_base 1^2: mod_base = OTHER; note = Phosphorothioate bond
  modified_base 2: mod_base = OTHER; note = 2'-Fluoro-cytidine
  modified_base 2^3: mod_base = OTHER; note = Phosphorothioate bond
  modified_base 3: mod_base = gm
  modified_base 4: mod_base = gm
  modified_base 5: mod_base = um
  modified_base 6: mod_base = OTHER; note = 2'-Fluoro-guanosine
  modified_base 7: mod_base = um
  modified_base 8: mod_base = cm
  modified_base 9: mod_base = cm
  modified_base 10: mod_base = cm
  modified_base 11: mod_base = gm
  modified_base 12: mod_base = OTHER; note = 2'-O-methyl-adenosine
  modified_base 13: mod_base = um
  modified_base 14: mod_base = OTHER; note = 2'-Fluoro-guanosine
  modified_base 15: mod_base = um
  modified_base 16: mod_base = OTHER; note = 2'-Fluoro-cytidine
  modified_base 17: mod_base = cm
  modified_base 18: mod_base = OTHER; note = 2'-Fluoro-adenosine
  modified_base 19: mod_base = cm
  modified_base 20: mod_base = um
  modified_base 21: mod_base = gm
  modified_base 21^22: mod_base = OTHER; note = Phosphorothioate bond
  modified_base 22: mod_base = um
  modified_base 22^23: mod_base = OTHER; note = Phosphorothioate bond
  modified_base 23: mod_base = gm
tcggtgtcccgatgtccactgtg

SEQ ID NO: 871 - RNA, 23 nt, synthetic construct
  source 1..23: mol_type = other RNA
  modified_base 1: mod_base = cm
  modified_base 1^2: mod_base = OTHER; note = Phosphorothioate bond
  modified_base 2: mod_base = OTHER; note = 2'-Fluoro-guanosine
  modified_base 2^3: mod_base = OTHER; note = Phosphorothioate bond
  modified_base 3: mod_base = gm
  modified_base 4: mod_base = um
  modified_base 5: mod_base = cm
  modified_base 6: mod_base = OTHER; note = 2'-Fluoro-adenosine
  modified_base 7: mod_base = OTHER; note = 2'-O-methyl-adenosine
  modified_base 8: mod_base = OTHER; note = 2'-O-methyl-adenosine
  modified_base 9: mod_base = cm
  modified_base 10: mod_base = cm
  modified_base 11: mod_base = um
  modified_base 12: mod_base = cm
  modified_base 13: mod_base = um
  modified_base 14: mod_base = OTHER; note = 2'-Fluoro-guanosine
  modified_base 15: mod_base = OTHER; note = 2'-O-methyl-adenosine
  modified_base 16: mod_base = OTHER; note = 2'-Fluoro-guanosine
  modified_base 17: mod_base = gm
  modified_base 18: mod_base = OTHER; note = 2'-Fluoro-adenosine
  modified_base 19: mod_base = um
  modified_base 20: mod_base = um
  modified_base 21: mod_base = gm
  modified_base 21^22: mod_base = OTHER; note = Phosphorothioate bond
  modified_base 22: mod_base = gm
  modified_base 22^23: mod_base = OTHER; note = Phosphorothioate bond
  modified_base 23: mod_base = gm
cggtcaaacctctgaggattggg

SEQ ID NO: 872 - RNA, 23 nt, synthetic construct
  source 1..23: mol_type = other RNA
  modified_base 1: mod_base = cm
  modified_base 1^2: mod_base = OTHER; note = Phosphorothioate bond
  modified_base 2: mod_base = OTHER; note = 2'-Fluoro-cytidine
  modified_base 2^3: mod_base = OTHER; note = Phosphorothioate bond
  modified_base 3: mod_base = OTHER; note = 2'-O-methyl-adenosine
  modified_base 4: mod_base = cm
  modified_base 5: mod_base = gm
  modified_base 6: mod_base = OTHER; note = 2'-Fluoro-adenosine
  modified_base 7: mod_base = gm
  modified_base 8: mod_base = cm
  modified_base 9: mod_base = OTHER; note = 2'-O-methyl-adenosine
  modified_base 10: mod_base = gm
  modified_base 11: mod_base = gm
  modified_base 12: mod_base = cm
  modified_base 13: mod_base = gm
  modified_base 14: mod_base = OTHER; note = 2'-Fluoro-guanosine
  modified_base 15: mod_base = cm
  modified_base 16: mod_base = OTHER; note = 2'-Fluoro-adenosine
  modified_base 17: mod_base = gm
  modified_base 18: mod_base = OTHER; note = 2'-Fluoro-guanosine
  modified_base 19: mod_base = cm
  modified_base 20: mod_base = cm
  modified_base 21: mod_base = cm
  modified_base 21^22: mod_base = OTHER; note = Phosphorothioate bond
  modified_base 22: mod_base = gm
  modified_base 22^23: mod_base = OTHER; note = Phosphorothioate bond
  modified_base 23: mod_base = cm
ccacgagcaggcggcaggcccgc

SEQ ID NO: 873 - RNA, 23 nt, synthetic construct
  source 1..23: mol_type = other RNA
  modified_base 1: mod_base = cm
  modified_base 1^2: mod_base = OTHER; note = Phosphorothioate bond
  modified_base 2: mod_base = OTHER; note = 2'-Fluoro-adenosine
  modified_base 2^3: mod_base = OTHER; note = Phosphorothioate bond
  modified_base 3: mod_base = cm
  modified_base 4: mod_base = gm
  modified_base 5: mod_base = OTHER; note = 2'-O-methyl-adenosine
  modified_base 6: mod_base = OTHER; note = 2'-Fluoro-guanosine
  modified_base 7: mod_base = cm
  modified_base 8: mod_base = OTHER; note = 2'-O-methyl-adenosine
  modified_base 9: mod_base = gm
  modified_base 10: mod_base = gm
  modified_base 11: mod_base = cm
  modified_base 12: mod_base = gm
  modified_base 13: mod_base = gm
  modified_base 14: mod_base = OTHER; note = 2'-Fluoro-cytidine
  modified_base 15: mod_base = OTHER; note = 2'-O-methyl-adenosine
  modified_base 16: mod_base = OTHER; note = 2'-Fluoro-guanosine
  modified_base 17: mod_base = gm
  modified_base 18: mod_base = OTHER; note = 2'-Fluoro-cytidine
  modified_base 19: mod_base = cm
  modified_base 20: mod_base = cm
  modified_base 21: mod_base = gm
  modified_base 21^22: mod_base = OTHER; note = Phosphorothioate bond
  modified_base 22: mod_base = cm
  modified_base 22^23: mod_base = OTHER; note = Phosphorothioate bond
  modified_base 23: mod_base = um
cacgagcaggcggcaggcccgct

SEQ ID NO: 874 - RNA, 21 nt, synthetic construct
  source 1..21: mol_type = other RNA
  modified_base <1: mod_base = OTHER; note = two inverted abasic nucleosides
  modified_base 1: mod_base = OTHER; note = 2'-O-methyl-adenosine
  modified_base 1^2: mod_base = OTHER; note = Phosphorothioate bond
  modified_base 2: mod_base = um
  modified_base 2^3: mod_base = OTHER; note = Phosphorothioate bond
  modified_base 3: mod_base = gm
  modified_base 4: mod_base = gm
  modified_base 5: mod_base = OTHER; note = 2'-O-methyl-adenosine
  modified_base 6: mod_base = um
  modified_base 7: mod_base = OTHER; note = 2'-O-methyl-adenosine
  modified_base 8: mod_base = OTHER; note = 2'-O-methyl-adenosine
  modified_base 9: mod_base = OTHER; note = 2'-Fluoro-guanosine
  modified_base 10: mod_base = OTHER; note = 2'-Fluoro-uridine
  modified_base 11: mod_base = OTHER; note = 2'-Fluoro-uridine
  modified_base 12: mod_base = um
  modified_base 13: mod_base = gm
  modified_base 14: mod_base = gm
  modified_base 15: mod_base = OTHER; note = 2'-O-methyl-adenosine
  modified_base 16: mod_base = um
  modified_base 17: mod_base = um
  modified_base 18: mod_base = cm
  modified_base 19: mod_base = OTHER; note = 2'-O-methyl-adenosine
  modified_base 20: mod_base = gm
  modified_base 21: mod_base = cm
atggataagtttggattcagc

SEQ ID NO: 875 - RNA, 21 nt, synthetic construct
  source 1..21: mol_type = other RNA
  modified_base <1: mod_base = OTHER; note = two inverted abasic nucleosides
  modified_base 1: mod_base = um
  modified_base 1^2: mod_base = OTHER; note = Phosphorothioate bond
  modified_base 2: mod_base = gm
  modified_base 2^3: mod_base = OTHER; note = Phosphorothioate bond
  modified_base 3: mod_base = gm
  modified_base 4: mod_base = um
  modified_base 5: mod_base = OTHER; note = 2'-O-methyl-adenosine
  modified_base 6: mod_base = gm
  modified_base 7: mod_base = um
  modified_base 8: mod_base = um
  modified_base 9: mod_base = OTHER; note = 2'-Fluoro-guanosine
  modified_base 10: mod_base = OTHER; note = 2'-Fluoro-uridine
  modified_base 11: mod_base = OTHER; note = 2'-Fluoro-adenosine
  modified_base 12: mod_base = OTHER; note = 2'-O-methyl-adenosine
  modified_base 13: mod_base = um
  modified_base 14: mod_base = um
  modified_base 15: mod_base = um
  modified_base 16: mod_base = OTHER; note = 2'-O-methyl-adenosine
  modified_base 17: mod_base = OTHER; note = 2'-O-methyl-adenosine
  modified_base 18: mod_base = cm
  modified_base 19: mod_base = OTHER; note = 2'-O-methyl-adenosine
  modified_base 20: mod_base = gm
  modified_base 21: mod_base = OTHER; note = 2'-O-methyl-adenosine
tggtagttgtaatttaacaga

SEQ ID NO: 876 - RNA, 21 nt, synthetic construct
  source 1..21: mol_type = other RNA
  modified_base <1: mod_base = OTHER; note = two inverted abasic nucleosides
  modified_base 1: mod_base = um
  modified_base 1^2: mod_base = OTHER; note = Phosphorothioate bond
  modified_base 2: mod_base = OTHER; note = 2'-O-methyl-adenosine
  modified_base 2^3: mod_base = OTHER; note = Phosphorothioate bond
  modified_base 3: mod_base = OTHER; note = 2'-O-methyl-adenosine
  modified_base 4: mod_base = cm
  modified_base 5: mod_base = OTHER; note = 2'-O-methyl-adenosine
  modified_base 6: mod_base = gm
  modified_base 7: mod_base = cm
  modified_base 8: mod_base = OTHER; note = 2'-O-methyl-adenosine
  modified_base 9: mod_base = OTHER; note = 2'-Fluoro-guanosine
  modified_base 10: mod_base = OTHER; note = 2'-Fluoro-uridine
  modified_base 11: mod_base = OTHER; note = 2'-Fluoro-cytidine
  modified_base 12: mod_base = OTHER; note = 2'-O-methyl-adenosine
  modified_base 13: mod_base = gm
  modified_base 14: mod_base = gm
  modified_base 15: mod_base = um
  modified_base 16: mod_base = um
  modified_base 17: mod_base = gm
  modified_base 18: mod_base = um
  modified_base 19: mod_base = um
  modified_base 20: mod_base = um
  modified_base 21: mod_base = OTHER; note = 2'-O-methyl-adenosine
taacagcagtcaggttgttta

SEQ ID NO: 877 - RNA, 21 nt, synthetic construct
  source 1..21: mol_type = other RNA
  modified_base <1: mod_base = OTHER; note = two inverted abasic nucleosides
  modified_base 1: mod_base = um
  modified_base 1^2: mod_base = OTHER; note = Phosphorothioate bond
  modified_base 2: mod_base = um
  modified_base 2^3: mod_base = OTHER; note = Phosphorothioate bond
  modified_base 3: mod_base = gm
  modified_base 4: mod_base = um
  modified_base 5: mod_base = cm
  modified_base 6: mod_base = um
  modified_base 7: mod_base = gm
  modified_base 8: mod_base = OTHER; note = 2'-O-methyl-adenosine
  modified_base 9: mod_base = OTHER; note = 2'-Fluoro-uridine
  modified_base 10: mod_base = OTHER; note = 2'-Fluoro-uridine
  modified_base 11: mod_base = OTHER; note = 2'-Fluoro-uridine
  modified_base 12: mod_base = cm
  modified_base 13: mod_base = um
  modified_base 14: mod_base = gm
  modified_base 15: mod_base = OTHER; note = 2'-O-methyl-adenosine
  modified_base 16: mod_base = OTHER; note = 2'-O-methyl-adenosine
  modified_base 17: mod_base = um
  modified_base 18: mod_base = gm
  modified_base 19: mod_base = um
  modified_base 20: mod_base = OTHER; note = 2'-O-methyl-adenosine
  modified_base 21: mod_base = OTHER; note = 2'-O-methyl-adenosine
ttgtctgatttctgaatgtaa

SEQ ID NO: 878 - RNA, 21 nt, synthetic construct
  source 1..21: mol_type = other RNA
  modified_base <1: mod_base = OTHER; note = two inverted abasic nucleosides
  modified_base 1: mod_base = gm
  modified_base 1^2: mod_base = OTHER; note = Phosphorothioate bond
  modified_base 2: mod_base = um
  modified_base 2^3: mod_base = OTHER; note = Phosphorothioate bond
  modified_base 3: mod_base = gm
  modified_base 4: mod_base = um
  modified_base 5: mod_base = um
  modified_base 6: mod_base = cm
  modified_base 7: mod_base = OTHER; note = 2'-O-methyl-adenosine
  modified_base 8: mod_base = OTHER; note = 2'-O-methyl-adenosine
  modified_base 9: mod_base = OTHER; note = 2'-Fluoro-adenosine
  modified_base 10: mod_base = OTHER; note = 2'-Fluoro-adenosine
  modified_base 11: mod_base = OTHER; note = 2'-Fluoro-cytidine
  modified_base 12: mod_base = OTHER; note = 2'-O-methyl-adenosine
  modified_base 13: mod_base = gm
  modified_base 14: mod_base = OTHER; note = 2'-O-methyl-adenosine
  modified_base 15: mod_base = OTHER; note = 2'-O-methyl-adenosine
  modified_base 16: mod_base = cm
  modified_base 17: mod_base = um
  modified_base 18: mod_base = gm
  modified_base 19: mod_base = um
  modified_base 20: mod_base = OTHER; note = 2'-O-methyl-adenosine
  modified_base 21: mod_base = um
gtgttcaaaacagaactgtat

SEQ ID NO: 879 - RNA, 21 nt, synthetic construct
  source 1..21: mol_type = other RNA
  modified_base <1: mod_base = OTHER; note = two inverted abasic nucleosides
  modified_base 1: mod_base = OTHER; note = 2'-O-methyl-adenosine
  modified_base 1^2: mod_base = OTHER; note = Phosphorothioate bond
  modified_base 2: mod_base = gm
  modified_base 2^3: mod_base = OTHER; note = Phosphorothioate bond
  modified_base 3: mod_base = OTHER; note = 2'-O-methyl-adenosine
  modified_base 4: mod_base = um
  modified_base 5: mod_base = gm
  modified_base 6: mod_base = cm
  modified_base 7: mod_base = um
  modified_base 8: mod_base = OTHER; note = 2'-O-methyl-adenosine
  modified_base 9: mod_base = OTHER; note = 2'-Fluoro-adenosine
  modified_base 10: mod_base = OTHER; note = 2'-Fluoro-cytidine
  modified_base 11: mod_base = OTHER; note = 2'-Fluoro-uridine
  modified_base 12: mod_base = um
  modified_base 13: mod_base = gm
  modified_base 14: mod_base = gm
  modified_base 15: mod_base = um
  modified_base 16: mod_base = um
  modified_base 17: mod_base = cm
  modified_base 18: mod_base = um
  modified_base 19: mod_base = um
  modified_base 20: mod_base = um
  modified_base 21: mod_base = um
agatgctaacttggttctttt

SEQ ID NO: 880 - RNA, 21 nt, synthetic construct
  source 1..21: mol_type = other RNA
  modified_base <1: mod_base = OTHER; note = two inverted abasic nucleosides
  modified_base 1: mod_base = OTHER; note = 2'-O-methyl-adenosine
  modified_base 1^2: mod_base = OTHER; note = Phosphorothioate bond
  modified_base 2: mod_base = um
  modified_base 2^3: mod_base = OTHER; note = Phosphorothioate bond
  modified_base 3: mod_base = cm
  modified_base 4: mod_base = um
  modified_base 5: mod_base = cm
  modified_base 6: mod_base = OTHER; note = 2'-O-methyl-adenosine
  modified_base 7: mod_base = gm
  modified_base 8: mod_base = OTHER; note = 2'-O-methyl-adenosine
  modified_base 9: mod_base = OTHER; note = 2'-Fluoro-uridine
  modified_base 10: mod_base = OTHER; note = 2'-Fluoro-guanosine
  modified_base 11: mod_base = OTHER; note = 2'-Fluoro-cytidine
  modified_base 12: mod_base = um
  modified_base 13: mod_base = OTHER; note = 2'-O-methyl-adenosine
  modified_base 14: mod_base = OTHER; note = 2'-O-methyl-adenosine
  modified_base 15: mod_base = cm
  modified_base 16: mod_base = um
  modified_base 17: mod_base = um
  modified_base 18: mod_base = gm
  modified_base 19: mod_base = gm
  modified_base 20: mod_base = um
  modified_base 21: mod_base = um
atctcagatgctaacttggtt

SEQ ID NO: 881 - RNA, 21 nt, synthetic construct
  source 1..21: mol_type = other RNA
  modified_base <1: mod_base = OTHER; note = two inverted abasic nucleosides
  modified_base 1: mod_base = um
  modified_base 1^2: mod_base = OTHER; note = Phosphorothioate bond
  modified_base 2: mod_base = gm
  modified_base 2^3: mod_base = OTHER; note = Phosphorothioate bond
  modified_base 3: mod_base = um
  modified_base 4: mod_base = cm
  modified_base 5: mod_base = um
  modified_base 6: mod_base = gm
  modified_base 7: mod_base = OTHER; note = 2'-O-methyl-adenosine
  modified_base 8: mod_base = um
  modified_base 9: mod_base = OTHER; note = 2'-Fluoro-uridine
  modified_base 10: mod_base = OTHER; note = 2'-Fluoro-uridine
  modified_base 11: mod_base = OTHER; note = 2'-Fluoro-cytidine
  modified_base 12: mod_base = um
  modified_base 13: mod_base = gm
  modified_base 14: mod_base = OTHER; note = 2'-O-methyl-adenosine
  modified_base 15: mod_base = OTHER; note = 2'-O-methyl-adenosine
  modified_base 16: mod_base = um
  modified_base 17: mod_base = gm
  modified_base 18: mod_base = um
  modified_base 19: mod_base = OTHER; note = 2'-O-methyl-adenosine
  modified_base 20: mod_base = OTHER; note = 2'-O-methyl-adenosine
  modified_base 21: mod_base = OTHER; note = 2'-O-methyl-adenosine
tgtctgatttctgaatgtaaa

SEQ ID NO: 882 - RNA, 21 nt, synthetic construct
  source 1..21: mol_type = other RNA
  modified_base <1: mod_base = OTHER; note = two inverted abasic nucleosides
  modified_base 1: mod_base = cm
  modified_base 1^2: mod_base = OTHER; note = Phosphorothioate bond
  modified_base 2: mod_base = OTHER; note = 2'-O-methyl-adenosine
  modified_base 2^3: mod_base = OTHER; note = Phosphorothioate bond
  modified_base 3: mod_base = gm
  modified_base 4: mod_base = OTHER; note = 2'-O-methyl-adenosine
  modified_base 5: mod_base = um
  modified_base 6: mod_base = gm
  modified_base 7: mod_base = cm
  modified_base 8: mod_base = um
  modified_base 9: mod_base = OTHER; note = 2'-Fluoro-adenosine
  modified_base 10: mod_base = OTHER; note = 2'-Fluoro-adenosine
  modified_base 11: mod_base = OTHER; note = 2'-Fluoro-cytidine
  modified_base 12: mod_base = um
  modified_base 13: mod_base = um
  modified_base 14: mod_base = gm
  modified_base 15: mod_base = gm
  modified_base 16: mod_base = um
  modified_base 17: mod_base = um
  modified_base 18: mod_base = cm
  modified_base 19: mod_base = um
  modified_base 20: mod_base = um
  modified_base 21: mod_base = um
cagatgctaacttggttcttt

SEQ ID NO: 883 - RNA, 21 nt, synthetic construct
  source 1..21: mol_type = other RNA
  modified_base <1: mod_base = OTHER; note = two inverted abasic nucleosides
  modified_base 1: mod_base = um
  modified_base 1^2: mod_base = OTHER; note = Phosphorothioate bond
  modified_base 2: mod_base = OTHER; note = 2'-O-methyl-adenosine
  modified_base 2^3: mod_base = OTHER; note = Phosphorothioate bond
  modified_base 3: mod_base = gm
  modified_base 4: mod_base = um
  modified_base 5: mod_base = um
  modified_base 6: mod_base = gm
  modified_base 7: mod_base = um
  modified_base 8: mod_base = OTHER; note = 2'-O-methyl-adenosine
  modified_base 9: mod_base = OTHER; note = 2'-Fluoro-adenosine
  modified_base 10: mod_base = OTHER; note = 2'-Fluoro-uridine
  modified_base 11: mod_base = OTHER; note = 2'-Fluoro-uridine
  modified_base 12: mod_base = um
  modified_base 13: mod_base = OTHER; note = 2'-O-methyl-adenosine
  modified_base 14: mod_base = OTHER; note = 2'-O-methyl-adenosine
  modified_base 15: mod_base = cm
  modified_base 16: mod_base = OTHER; note = 2'-O-methyl-adenosine
  modified_base 17: mod_base = gm
  modified_base 18: mod_base = OTHER; note = 2'-O-methyl-adenosine
  modified_base 19: mod_base = OTHER; note = 2'-O-methyl-adenosine
  modified_base 20: mod_base = OTHER; note = 2'-O-methyl-adenosine
  modified_base 21: mod_base = OTHER; note = 2'-O-methyl-adenosine
tagttgtaatttaacagaaaa

SEQ ID NO: 884 - RNA, 21 nt, synthetic construct
  source 1..21: mol_type = other RNA
  modified_base <1: mod_base = OTHER; note = two inverted abasic nucleosides
  modified_base 1: mod_base = gm
  modified_base 1^2: mod_base = OTHER; note = Phosphorothioate bond
  modified_base 2: mod_base = OTHER; note = 2'-O-methyl-adenosine
  modified_base 2^3: mod_base = OTHER; note = Phosphorothioate bond
  modified_base 3: mod_base = um
  modified_base 4: mod_base = um
  modified_base 5: mod_base = gm
  modified_base 6: mod_base = um
  modified_base 7: mod_base = cm
  modified_base 8: mod_base = um
  modified_base 9: mod_base = OTHER; note = 2'-Fluoro-guanosine
  modified_base 10: mod_base = OTHER; note = 2'-Fluoro-adenosine
  modified_base 11: mod_base = OTHER; note = 2'-Fluoro-uridine
  modified_base 12: mod_base = um
  modified_base 13: mod_base = um
  modified_base 14: mod_base = cm
  modified_base 15: mod_base = um
  modified_base 16: mod_base = gm
  modified_base 17: mod_base = OTHER; note = 2'-O-methyl-adenosine
  modified_base 18: mod_base = OTHER; note = 2'-O-methyl-adenosine
  modified_base 19: mod_base = um
  modified_base 20: mod_base = gm
  modified_base 21: mod_base = um
gattgtctgatttctgaatgt

SEQ ID NO: 885 - RNA, 21 nt, synthetic construct
  source 1..21: mol_type = other RNA
  modified_base <1: mod_base = OTHER; note = two inverted abasic nucleosides
  modified_base 1: mod_base = um
  modified_base 1^2: mod_base = OTHER; note = Phosphorothioate bond
  modified_base 2: mod_base = um
  modified_base 2^3: mod_base = OTHER; note = Phosphorothioate bond
  modified_base 3: mod_base = um
  modified_base 4: mod_base = cm
  modified_base 5: mod_base = OTHER; note = 2'-O-methyl-adenosine
  modified_base 6: mod_base = OTHER; note = 2'-O-methyl-adenosine
  modified_base 7: mod_base = cm
  modified_base 8: mod_base = cm
  modified_base 9: mod_base = OTHER; note = 2'-Fluoro-adenosine
  modified_base 10: mod_base = OTHER; note = 2'-Fluoro-uridine
  modified_base 11: mod_base = OTHER; note = 2'-Fluoro-uridine
  modified_base 12: mod_base = cm
  modified_base 13: mod_base = um
  modified_base 14: mod_base = um
  modified_base 15: mod_base = OTHER; note = 2'-O-methyl-adenosine
  modified_base 16: mod_base = OTHER; note = 2'-O-methyl-adenosine
  modified_base 17: mod_base = um
  modified_base 18: mod_base = gm
  modified_base 19: mod_base = um
  modified_base 20: mod_base = um
  modified_base 21: mod_base = OTHER; note = 2'-O-methyl-adenosine
tttcaaccattcttaatgtta

SEQ ID NO: 886 - RNA, 21 nt, synthetic construct
  source 1..21: mol_type = other RNA
  modified_base <1: mod_base = OTHER; note = two inverted abasic nucleosides
  modified_base 1: mod_base = OTHER; note = 2'-O-methyl-adenosine
  modified_base 1^2: mod_base = OTHER; note = Phosphorothioate bond
  modified_base 2: mod_base = OTHER; note = 2'-O-methyl-adenosine
  modified_base 2^3: mod_base = OTHER; note = Phosphorothioate bond
  modified_base 3: mod_base = OTHER; note = 2'-O-methyl-adenosine
  modified_base 4: mod_base = um
  modified_base 5: mod_base = OTHER; note = 2'-O-methyl-adenosine
  modified_base 6: mod_base = OTHER; note = 2'-O-methyl-adenosine
  modified_base 7: mod_base = cm
  modified_base 8: mod_base = OTHER; note = 2'-O-methyl-adenosine
  modified_base 9: mod_base = OTHER; note = 2'-Fluoro-guanosine
  modified_base 10: mod_base = OTHER; note = 2'-Fluoro-cytidine
  modified_base 11: mod_base = OTHER; note = 2'-Fluoro-adenosine
  modified_base 12: mod_base = gm
  modified_base 13: mod_base = um
  modified_base 14: mod_base = cm
  modified_base 15: mod_base = OTHER; note = 2'-O-methyl-adenosine
  modified_base 16: mod_base = gm
  modified_base 17: mod_base = gm
  modified_base 18: mod_base = um
  modified_base 19: mod_base = um
  modified_base 20: mod_base = gm
  modified_base 21: mod_base = um
aaataacagcagtcaggttgt

SEQ ID NO: 887 - RNA, 21 nt, synthetic construct
  source 1..21: mol_type = other RNA
  modified_base <1: mod_base = OTHER; note = two inverted abasic nucleosides
  modified_base 1: mod_base = um
  modified_base 1^2: mod_base = OTHER; note = Phosphorothioate bond
  modified_base 2: mod_base = cm
  modified_base 2^3: mod_base = OTHER; note = Phosphorothioate bond
  modified_base 3: mod_base = OTHER; note = 2'-O-methyl-adenosine
  modified_base 4: mod_base = gm
  modified_base 5: mod_base = OTHER; note = 2'-O-methyl-adenosine
  modified_base 6: mod_base = um
  modified_base 7: mod_base = gm
  modified_base 8: mod_base = cm
  modified_base 9: mod_base = OTHER; note = 2'-Fluoro-uridine
  modified_base 10: mod_base = OTHER; note = 2'-Fluoro-adenosine
  modified_base 11: mod_base = OTHER; note = 2'-Fluoro-adenosine
  modified_base 12: mod_base = cm
  modified_base 13: mod_base = um
  modified_base 14: mod_base = um
  modified_base 15: mod_base = gm
  modified_base 16: mod_base = gm
  modified_base 17: mod_base = um
  modified_base 18: mod_base = um
  modified_base 19: mod_base = cm
  modified_base 20: mod_base = um
  modified_base 21: mod_base = um
tcagatgctaacttggttctt

SEQ ID NO: 888 - RNA, 21 nt, synthetic construct
  source 1..21: mol_type = other RNA
  modified_base <1: mod_base = OTHER; note = two inverted abasic nucleosides
  modified_base 1: mod_base = cm
  modified_base 1^2: mod_base = OTHER; note = Phosphorothioate bond
  modified_base 2: mod_base = um
  modified_base 2^3: mod_base = OTHER; note = Phosphorothioate bond
  modified_base 3: mod_base = cm
  modified_base 4: mod_base = um
  modified_base 5: mod_base = cm
  modified_base 6: mod_base = um
  modified_base 7: mod_base = gm
  modified_base 8: mod_base = OTHER; note = 2'-O-methyl-adenosine
  modified_base 9: mod_base = OTHER; note = 2'-Fluoro-uridine
  modified_base 10: mod_base = OTHER; note = 2'-Fluoro-guanosine
  modified_base 11: mod_base = OTHER; note = 2'-Fluoro-guanosine
  modified_base 12: mod_base = um
  modified_base 13: mod_base = um
  modified_base 14: mod_base = um
  modified_base 15: mod_base = gm
  modified_base 16: mod_base = OTHER; note = 2'-O-methyl-adenosine
  modified_base 17: mod_base = OTHER; note = 2'-O-methyl-adenosine
  modified_base 18: mod_base = cm
  modified_base 19: mod_base = um
  modified_base 20: mod_base = cm
  modified_base 21: mod_base = OTHER; note = 2'-O-methyl-adenosine
ctctctgatggtttgaactca

SEQ ID NO: 889 - RNA, 21 nt, synthetic construct
  source 1..21: mol_type = other RNA
  modified_base <1: mod_base = OTHER; note = two inverted abasic nucleosides
  modified_base 1: mod_base = um
  modified_base 1^2: mod_base = OTHER; note = Phosphorothioate bond
  modified_base 2: mod_base = OTHER; note = 2'-O-methyl-adenosine
  modified_base 2^3: mod_base = OTHER; note = Phosphorothioate bond
  modified_base 3: mod_base = gm
  modified_base 4: mod_base = cm
  modified_base 5: mod_base = um
  modified_base 6: mod_base = gm
  modified_base 7: mod_base = um
  modified_base 8: mod_base = um
  modified_base 9: mod_base = OTHER; note = 2'-Fluoro-uridine
  modified_base 10: mod_base = OTHER; note = 2'-Fluoro-adenosine
  modified_base 11: mod_base = OTHER; note = 2'-Fluoro-adenosine
  modified_base 12: mod_base = um
  modified_base 13: mod_base = gm
  modified_base 14: mod_base = um
  modified_base 15: mod_base = um
  modified_base 16: mod_base = OTHER; note = 2'-O-methyl-adenosine
  modified_base 17: mod_base = OTHER; note = 2'-O-methyl-adenosine
  modified_base 18: mod_base = gm
  modified_base 19: mod_base = um
  modified_base 20: mod_base = cm
  modified_base 21: mod_base = OTHER; note = 2'-O-methyl-adenosine
tagctgtttaatgttaagtca

SEQ ID NO: 890 - RNA, 21 nt, synthetic construct
  source 1..21: mol_type = other RNA
  modified_base <1: mod_base = OTHER; note = two inverted abasic nucleosides
  modified_base 1: mod_base = cm
  modified_base 1^2: mod_base = OTHER; note = Phosphorothioate bond
  modified_base 2: mod_base = cm
  modified_base 2^3: mod_base = OTHER; note = Phosphorothioate bond
  modified_base 3: mod_base = um
  modified_base 4: mod_base = um
  modified_base 5: mod_base = OTHER; note = 2'-O-methyl-adenosine
  modified_base 6: mod_base = um
  modified_base 7: mod_base = gm
  modified_base 8: mod_base = um
  modified_base 9: mod_base = OTHER; note = 2'-Fluoro-uridine
  modified_base 10: mod_base = OTHER; note = 2'-Fluoro-cytidine
  modified_base 11: mod_base = OTHER; note = 2'-Fluoro-adenosine
  modified_base 12: mod_base = gm
  modified_base 13: mod_base = um
  modified_base 14: mod_base = OTHER; note = 2'-O-methyl-adenosine
  modified_base 15: mod_base = um
  modified_base 16: mod_base = um
  modified_base 17: mod_base = um
  modified_base 18: mod_base = um
  modified_base 19: mod_base = gm
  modified_base 20: mod_base = gm
  modified_base 21: mod_base = OTHER; note = 2'-O-methyl-adenosine
ccttatgttcagtattttgga

SEQ ID NO: 891 - RNA, 21 nt, synthetic construct
  source 1..21: mol_type = other RNA
  modified_base <1: mod_base = OTHER; note = two inverted abasic nucleosides
  modified_base 1: mod_base = um
  modified_base 1^2: mod_base = OTHER; note = Phosphorothioate bond
  modified_base 2: mod_base = um
  modified_base 2^3: mod_base = OTHER; note = Phosphorothioate bond
  modified_base 3: mod_base = OTHER; note = 2'-O-methyl-adenosine
  modified_base 4: mod_base = um
  modified_base 5: mod_base = cm
  modified_base 6: mod_base = um
  modified_base 7: mod_base = gm
  modified_base 8: mod_base = um
  modified_base 9: mod_base = OTHER; note = 2'-Fluoro-guanosine
  modified_base 10: mod_base = OTHER; note = 2'-Fluoro-cytidine
  modified_base 11: mod_base = OTHER; note = 2'-Fluoro-cytidine
  modified_base 12: mod_base = um
  modified_base 13: mod_base = um
  modified_base 14: mod_base = um
  modified_base 15: mod_base = OTHER; note = 2'-O-methyl-adenosine
  modified_base 16: mod_base = cm
  modified_base 17: mod_base = um
  modified_base 18: mod_base = gm
  modified_base 19: mod_base = cm
  modified_base 20: mod_base = um
  modified_base 21: mod_base = um
ttatctgtgcctttactgctt

SEQ ID NO: 892 - RNA, 21 nt, synthetic construct
  source 1..21: mol_type = other RNA
  modified_base <1: mod_base = OTHER; note = two inverted abasic nucleosides
  modified_base 1: mod_base = um
  modified_base 1^2: mod_base = OTHER; note = Phosphorothioate bond
  modified_base 2: mod_base = OTHER; note = 2'-O-methyl-adenosine
  modified_base 2^3: mod_base = OTHER; note = Phosphorothioate bond
  modified_base 3: mod_base = gm
  modified_base 4: mod_base = cm
  modified_base 5: mod_base = OTHER; note = 2'-O-methyl-adenosine
  modified_base 6: mod_base = OTHER; note = 2'-O-methyl-adenosine
  modified_base 7: mod_base = OTHER; note = 2'-O-methyl-adenosine
  modified_base 8: mod_base = OTHER; note = 2'-O-methyl-adenosine
  modified_base 9: mod_base = OTHER; note = 2'-Fluoro-guanosine
  modified_base 10: mod_base = OTHER; note = 2'-Fluoro-guanosine
  modified_base 11: mod_base = OTHER; note = 2'-Fluoro-adenosine
  modified_base 12: mod_base = um
  modified_base 13: mod_base = um
  modified_base 14: mod_base = um
  modified_base 15: mod_base = um
  modified_base 16: mod_base = OTHER; note = 2'-O-methyl-adenosine
  modified_base 17: mod_base = OTHER; note = 2'-O-methyl-adenosine
  modified_base 18: mod_base = OTHER; note = 2'-O-methyl-adenosine
  modified_base 19: mod_base = OTHER; note = 2'-O-methyl-adenosine
  modified_base 20: mod_base = cm
  modified_base 21: mod_base = um
tagcaaaaggattttaaaact

SEQ ID NO: 893 - RNA, 21 nt, synthetic construct
  source 1..21: mol_type = other RNA
  modified_base <1: mod_base = OTHER; note = two inverted abasic nucleosides
  modified_base 1: mod_base = um
  modified_base 1^2: mod_base = OTHER; note = Phosphorothioate bond
  modified_base 2: mod_base = cm
  modified_base 2^3: mod_base = OTHER; note = Phosphorothioate bond
  modified_base 3: mod_base = um
  modified_base 4: mod_base = cm
  modified_base 5: mod_base = OTHER; note = 2'-O-methyl-adenosine
  modified_base 6: mod_base = gm
  modified_base 7: mod_base = OTHER; note = 2'-O-methyl-adenosine
  modified_base 8: mod_base = um
  modified_base 9: mod_base = OTHER; note = 2'-Fluoro-guanosine
  modified_base 10: mod_base = OTHER; note = 2'-Fluoro-cytidine
  modified_base 11: mod_base = OTHER; note = 2'-Fluoro-uridine
  modified_base 12: mod_base = OTHER; note = 2'-O-methyl-adenosine
  modified_base 13: mod_base = OTHER; note = 2'-O-methyl-adenosine
  modified_base 14: mod_base = cm
  modified_base 15: mod_base = um
  modified_base 16: mod_base = um
  modified_base 17: mod_base = gm
  modified_base 18: mod_base = gm
  modified_base 19: mod_base = um
  modified_base 20: mod_base = um
  modified_base 21: mod_base = cm
tctcagatgctaacttggttc

SEQ ID NO: 894 - RNA, 21 nt, synthetic construct
  source 1..21: mol_type = other RNA
  modified_base <1: mod_base = OTHER; note = two inverted abasic nucleosides
  modified_base 1: mod_base = OTHER; note = 2'-O-methyl-adenosine
  modified_base 1^2: mod_base = OTHER; note = Phosphorothioate bond
  modified_base 2: mod_base = um
  modified_base 2^3: mod_base = OTHER; note = Phosphorothioate bond
  modified_base 3: mod_base = cm
  modified_base 4: mod_base = OTHER; note = 2'-O-methyl-adenosine
  modified_base 5: mod_base = cm
  modified_base 6: mod_base = um
  modified_base 7: mod_base = gm
  modified_base 8: mod_base = um
  modified_base 9: mod_base = OTHER; note = 2'-Fluoro-guanosine
  modified_base 10: mod_base = OTHER; note = 2'-Fluoro-cytidine
  modified_base 11: mod_base = OTHER; note = 2'-Fluoro-adenosine
  modified_base 12: mod_base = um
  modified_base 13: mod_base = OTHER; note = 2'-O-methyl-adenosine
  modified_base 14: mod_base = um
  modified_base 15: mod_base = gm
  modified_base 16: mod_base = um
  modified_base 17: mod_base = cm
  modified_base 18: mod_base = um
  modified_base 19: mod_base = um
  modified_base 20: mod_base = um
  modified_base 21: mod_base = um
atcactgtgcatatgtctttt

SEQ ID NO: 895 - RNA, 21 nt, synthetic construct
  source 1..21: mol_type = other RNA
  modified_base <1: mod_base = OTHER; note = two inverted abasic nucleosides
  modified_base 1: mod_base = OTHER; note = 2'-O-methyl-adenosine
  modified_base 1^2: mod_base = OTHER; note = Phosphorothioate bond
  modified_base 2: mod_base = um
  modified_base 2^3: mod_base = OTHER; note = Phosphorothioate bond
  modified_base 3: mod_base = cm
  modified_base 4: mod_base = cm
  modified_base 5: mod_base = OTHER; note = 2'-O-methyl-adenosine
  modified_base 6: mod_base = OTHER; note = 2'-O-methyl-adenosine
  modified_base 7: mod_base = OTHER; note = 2'-O-methyl-adenosine
  modified_base 8: mod_base = um
  modified_base 9: mod_base = OTHER; note = 2'-Fluoro-uridine
  modified_base 10: mod_base = OTHER; note = 2'-Fluoro-uridine
  modified_base 11: mod_base = OTHER; note = 2'-Fluoro-guanosine
  modified_base 12: mod_base = cm
  modified_base 13: mod_base = OTHER; note = 2'-O-methyl-adenosine
  modified_base 14: mod_base = um
  modified_base 15: mod_base = OTHER; note = 2'-O-methyl-adenosine
  modified_base 16: mod_base = gm
  modified_base 17: mod_base = cm
  modified_base 18: mod_base = um
  modified_base 19: mod_base = gm
  modified_base 20: mod_base = um
  modified_base 21: mod_base = um
atccaaatttgcatagctgtt

SEQ ID NO: 896 - RNA, 21 nt, synthetic construct
  source 1..21: mol_type = other RNA
  modified_base <1: mod_base = OTHER; note = two inverted abasic nucleosides
  modified_base 1: mod_base = OTHER; note = 2'-O-methyl-adenosine
  modified_base 1^2: mod_base = OTHER; note = Phosphorothioate bond
  modified_base 2: mod_base = gm
  modified_base 2^3: mod_base = OTHER; note = Phosphorothioate bond
  modified_base 3: mod_base = OTHER; note = 2'-O-methyl-adenosine
  modified_base 4: mod_base = gm
  modified_base 5: mod_base = um
  modified_base 6: mod_base = gm
  modified_base 7: mod_base = cm
  modified_base 8: mod_base = um
  modified_base 9: mod_base = OTHER; note = 2'-Fluoro-guanosine
  modified_base 10: mod_base = OTHER; note = 2'-Fluoro-cytidine
  modified_base 11: mod_base = OTHER; note = 2'-Fluoro-uridine
  modified_base 12: mod_base = OTHER; note = 2'-O-methyl-adenosine
  modified_base 13: mod_base = OTHER; note = 2'-O-methyl-adenosine
  modified_base 14: mod_base = OTHER; note = 2'-O-methyl-adenosine
  modified_base 15: mod_base = OTHER; note = 2'-O-methyl-adenosine
  modified_base 16: mod_base = um
  modified_base 17: mod_base = um
  modified_base 18: mod_base = gm
  modified_base 19: mod_base = gm
  modified_base 20: mod_base = OTHER; note = 2'-O-methyl-adenosine
  modified_base 21: mod_base = um
agagtgctgctaaaattggat

SEQ ID NO: 897 - RNA, 21 nt, synthetic construct
  source 1..21: mol_type = other RNA
  modified_base <1: mod_base = OTHER; note = two inverted abasic nucleosides
  modified_base 1: mod_base = um
  modified_base 1^2: mod_base = OTHER; note = Phosphorothioate bond
  modified_base 2: mod_base = um
  modified_base 2^3: mod_base = OTHER; note = Phosphorothioate bond
  modified_base 3: mod_base = gm
  modified_base 4: mod_base = OTHER; note = 2'-O-methyl-adenosine
  modified_base 5: mod_base = um
  modified_base 6: mod_base = cm
  modified_base 7: mod_base = cm
  modified_base 8: mod_base = OTHER; note = 2'-O-methyl-adenosine
  modified_base 9: mod_base = OTHER; note = 2'-Fluoro-adenosine
  modified_base 10: mod_base = OTHER; note = 2'-Fluoro-adenosine
  modified_base 11: mod_base = OTHER; note = 2'-Fluoro-uridine
  modified_base 12: mod_base = um
  modified_base 13: mod_base = um
  modified_base 14: mod_base = gm
  modified_base 15: mod_base = cm
  modified_base 16: mod_base = OTHER; note = 2'-O-methyl-adenosine
  modified_base 17: mod_base = um
  modified_base 18: mod_base = OTHER; note = 2'-O-methyl-adenosine
  modified_base 19: mod_base = gm
  modified_base 20: mod_base = cm
  modified_base 21: mod_base = um
ttgatccaaatttgcatagct

SEQ ID NO: 898 - RNA, 21 nt, synthetic construct
  source 1..21: mol_type = other RNA
  modified_base <1: mod_base = OTHER; note = two inverted abasic nucleosides
  modified_base 1: mod_base = gm
  modified_base 1^2: mod_base = OTHER; note = Phosphorothioate bond
  modified_base 2: mod_base = gm
  modified_base 2^3: mod_base = OTHER; note = Phosphorothioate bond
  modified_base 3: mod_base = um
  modified_base 4: mod_base = gm
  modified_base 5: mod_base = um
  modified_base 6: mod_base = um
  modified_base 7: mod_base = cm
  modified_base 8: mod_base = OTHER; note = 2'-O-methyl-adenosine
  modified_base 9: mod_base = OTHER; note = 2'-Fluoro-adenosine
  modified_base 10: mod_base = OTHER; note = 2'-Fluoro-adenosine
  modified_base 11: mod_base = OTHER; note = 2'-Fluoro-adenosine
  modified_base 12: mod_base = cm
  modified_base 13: mod_base = OTHER; note = 2'-O-methyl-adenosine
  modified_base 14: mod_base = gm
  modified_base 15: mod_base = OTHER; note = 2'-O-methyl-adenosine
  modified_base 16: mod_base = OTHER; note = 2'-O-methyl-adenosine
  modified_base 17: mod_base = cm
  modified_base 18: mod_base = um
  modified_base 19: mod_base = gm
  modified_base 20: mod_base = um
  modified_base 21: mod_base = OTHER; note = 2'-O-methyl-adenosine
ggtgttcaaaacagaactgta

SEQ ID NO: 899 - RNA, 21 nt, synthetic construct
  source 1..21: mol_type = other RNA
  modified_base <1: mod_base = OTHER; note = two inverted abasic nucleosides
  modified_base 1: mod_base = cm
  modified_base 1^2: mod_base = OTHER; note = Phosphorothioate bond
  modified_base 2: mod_base = um
  modified_base 2^3: mod_base = OTHER; note = Phosphorothioate bond
  modified_base 3: mod_base = gm
  modified_base 4: mod_base = um
  modified_base 5: mod_base = um
  modified_base 6: mod_base = um
  modified_base 7: mod_base = OTHER; note = 2'-O-methyl-adenosine
  modified_base 8: mod_base = OTHER; note = 2'-O-methyl-adenosine
  modified_base 9: mod_base = OTHER; note = 2'-Fluoro-uridine
  modified_base 10: mod_base = OTHER; note = 2'-Fluoro-guanosine
  modified_base 11: mod_base = OTHER; note = 2'-Fluoro-uridine
  modified_base 12: mod_base = um
  modified_base 13: mod_base = OTHER; note = 2'-O-methyl-adenosine
  modified_base 14: mod_base = OTHER; note = 2'-O-methyl-adenosine
  modified_base 15: mod_base = gm
  modified_base 16: mod_base = um
  modified_base 17: mod_base = cm
  modified_base 18: mod_base = OTHER; note = 2'-O-methyl-adenosine
  modified_base 19: mod_base = um
  modified_base 20: mod_base = gm
  modified_base 21: mod_base = OTHER; note = 2'-O-methyl-adenosine
ctgtttaatgttaagtcatga

SEQ ID NO: 900 - RNA, 21 nt, synthetic construct
  source 1..21: mol_type = other RNA
  modified_base <1: mod_base = OTHER; note = two inverted abasic nucleosides
  modified_base 1: mod_base = cm
  modified_base 1^2: mod_base = OTHER; note = Phosphorothioate bond
  modified_base 2: mod_base = um
  modified_base 2^3: mod_base = OTHER; note = Phosphorothioate bond
  modified_base 3: mod_base = gm
  modified_base 4: mod_base = um
  modified_base 5: mod_base = um
  modified_base 6: mod_base = cm
  modified_base 7: mod_base = cm
  modified_base 8: mod_base = OTHER; note = 2'-O-methyl-adenosine
  modified_base 9: mod_base = OTHER; note = 2'-Fluoro-cytidine
  modified_base 10: mod_base = OTHER; note = 2'-Fluoro-cytidine
  modified_base 11: mod_base = OTHER; note = 2'-Fluoro-uridine
  modified_base 12: mod_base = cm
  modified_base 13: mod_base = OTHER; note = 2'-O-methyl-adenosine
  modified_base 14: mod_base = gm
  modified_base 15: mod_base = gm
  modified_base 16: mod_base = um
  modified_base 17: mod_base = um
  modified_base 18: mod_base = um
  modified_base 19: mod_base = um
  modified_base 20: mod_base = cm
  modified_base 21: mod_base = OTHER; note = 2'-O-methyl-adenosine
ctgttccacctcaggttttca

SEQ ID NO: 901 - RNA, 21 nt, synthetic construct
  source 1..21: mol_type = other RNA
  modified_base <1: mod_base = OTHER; note = two inverted abasic nucleosides
  modified_base 1: mod_base = um
  modified_base 1^2: mod_base = OTHER; note = Phosphorothioate bond
  modified_base 2: mod_base = um
  modified_base 2^3: mod_base = OTHER; note = Phosphorothioate bond
  modified_base 3: mod_base = cm
  modified_base 4: mod_base = OTHER; note = 2'-O-methyl-adenosine
  modified_base 5: mod_base = OTHER; note = 2'-O-methyl-adenosine
  modified_base 6: mod_base = cm
  modified_base 7: mod_base = cm
  modified_base 8: mod_base = OTHER; note = 2'-O-methyl-adenosine
  modified_base 9: mod_base = OTHER; note = 2'-Fluoro-uridine
  modified_base 10: mod_base = OTHER; note = 2'-Fluoro-uridine
  modified_base 11: mod_base = OTHER; note = 2'-Fluoro-cytidine
  modified_base 12: mod_base = um
  modified_base 13: mod_base = um
  modified_base 14: mod_base = OTHER; note = 2'-O-methyl-adenosine
  modified_base 15: mod_base = OTHER; note = 2'-O-methyl-adenosine
  modified_base 16: mod_base = um
  modified_base 17: mod_base = gm
  modified_base 18: mod_base = um
  modified_base 19: mod_base = um
  modified_base 20: mod_base = OTHER; note = 2'-O-methyl-adenosine
  modified_base 21: mod_base = cm
ttcaaccattcttaatgttac

SEQ ID NO: 902 - RNA, 21 nt, synthetic construct
  source 1..21: mol_type = other RNA
  modified_base <1: mod_base = OTHER; note = two inverted abasic nucleosides
  modified_base 1: mod_base = um
  modified_base 1^2: mod_base = OTHER; note = Phosphorothioate bond
  modified_base 2: mod_base = cm
  modified_base 2^3: mod_base = OTHER; note = Phosphorothioate bond
  modified_base 3: mod_base = cm
  modified_base 4: mod_base = OTHER; note = 2'-O-methyl-adenosine
  modified_base 5: mod_base = gm
  modified_base 6: mod_base = OTHER; note = 2'-O-methyl-adenosine
  modified_base 7: mod_base = um
  modified_base 8: mod_base = um
  modified_base 9: mod_base = OTHER; note = 2'-Fluoro-guanosine
  modified_base 10: mod_base = OTHER; note = 2'-Fluoro-uridine
  modified_base 11: mod_base = OTHER; note = 2'-Fluoro-cytidine
  modified_base 12: mod_base = um
  modified_base 13: mod_base = gm
  modified_base 14: mod_base = OTHER; note = 2'-O-methyl-adenosine
  modified_base 15: mod_base = um
  modified_base 16: mod_base = um
  modified_base 17: mod_base = um
  modified_base 18: mod_base = cm
  modified_base 19: mod_base = um
  modified_base 20: mod_base = gm
  modified_base 21: mod_base = OTHER; note = 2'-O-methyl-adenosine
tccagattgtctgatttctga

SEQ ID NO: 903 - RNA, 21 nt, synthetic construct
  source 1..21: mol_type = other RNA
  modified_base <1: mod_base = OTHER; note = two inverted abasic nucleosides
  modified_base 1: mod_base = cm
  modified_base 1^2: mod_base = OTHER; note = Phosphorothioate bond
  modified_base 2: mod_base = um
  modified_base 2^3: mod_base = OTHER; note = Phosphorothioate bond
  modified_base 3: mod_base = cm
  modified_base 4: mod_base = OTHER; note = 2'-O-methyl-adenosine
  modified_base 5: mod_base = gm
  modified_base 6: mod_base = OTHER; note = 2'-O-methyl-adenosine
  modified_base 7: mod_base = um
  modified_base 8: mod_base = gm
  modified_base 9: mod_base = OTHER; note = 2'-Fluoro-cytidine
  modified_base 10: mod_base = OTHER; note = 2'-Fluoro-uridine
  modified_base 11: mod_base = OTHER; note = 2'-Fluoro-adenosine
  modified_base 12: mod_base = OTHER; note = 2'-O-methyl-adenosine
  modified_base 13: mod_base = cm
  modified_base 14: mod_base = um
  modified_base 15: mod_base = um
  modified_base 16: mod_base = gm
  modified_base 17: mod_base = gm
  modified_base 18: mod_base = um
  modified_base 19: mod_base = um
  modified_base 20: mod_base = cm
  modified_base 21: mod_base = um
ctcagatgctaacttggttct

SEQ ID NO: 904 - RNA, 21 nt, synthetic construct
  source 1..21: mol_type = other RNA
  modified_base <1: mod_base = OTHER; note = two inverted abasic nucleosides
  modified_base 1: mod_base = gm
  modified_base 1^2: mod_base = OTHER; note = Phosphorothioate bond
  modified_base 2: mod_base = cm
  modified_base 2^3: mod_base = OTHER; note = Phosphorothioate bond
  modified_base 3: mod_base = cm
  modified_base 4: mod_base = um
  modified_base 5: mod_base = OTHER; note = 2'-O-methyl-adenosine
  modified_base 6: mod_base = cm
  modified_base 7: mod_base = cm
  modified_base 8: mod_base = um
  modified_base 9: mod_base = OTHER; note = 2'-Fluoro-uridine
  modified_base 10: mod_base = OTHER; note = 2'-Fluoro-adenosine
  modified_base 11: mod_base = OTHER; note = 2'-Fluoro-uridine
  modified_base 12: mod_base = gm
  modified_base 13: mod_base = um
  modified_base 14: mod_base = um
  modified_base 15: mod_base = cm
  modified_base 16: mod_base = OTHER; note = 2'-O-methyl-adenosine
  modified_base 17: mod_base = gm
  modified_base 18: mod_base = um
  modified_base 19: mod_base = OTHER; note = 2'-O-methyl-adenosine
  modified_base 20: mod_base = um
  modified_base 21: mod_base = um
gcctaccttatgttcagtatt

SEQ ID NO: 905 - RNA, 21 nt, synthetic construct
  source 1..21: mol_type = other RNA
  modified_base <1: mod_base = OTHER; note = two inverted abasic nucleosides
  modified_base 1: mod_base = gm
  modified_base 1^2: mod_base = OTHER; note = Phosphorothioate bond
  modified_base 2: mod_base = um
  modified_base 2^3: mod_base = OTHER; note = Phosphorothioate bond
  modified_base 3: mod_base = um
  modified_base 4: mod_base = um
  modified_base 5: mod_base = OTHER; note = 2'-O-methyl-adenosine
  modified_base 6: mod_base = OTHER; note = 2'-O-methyl-adenosine
  modified_base 7: mod_base = um
  modified_base 8: mod_base = gm
  modified_base 9: mod_base = OTHER; note = 2'-Fluoro-uridine
  modified_base 10: mod_base = OTHER; note = 2'-Fluoro-uridine
  modified_base 11: mod_base = OTHER; note = 2'-Fluoro-adenosine
  modified_base 12: mod_base = OTHER; note = 2'-O-methyl-adenosine
  modified_base 13: mod_base = gm
  modified_base 14: mod_base = um
  modified_base 15: mod_base = cm
  modified_base 16: mod_base = OTHER; note = 2'-O-methyl-adenosine
  modified_base 17: mod_base = um
  modified_base 18: mod_base = gm
  modified_base 19: mod_base = OTHER; note = 2'-O-methyl-adenosine
  modified_base 20: mod_base = cm
  modified_base 21: mod_base = OTHER; note = 2'-O-methyl-adenosine
gtttaatgttaagtcatgaca

SEQ ID NO: 906 - RNA, 21 nt, synthetic construct
  source 1..21: mol_type = other RNA
  modified_base <1: mod_base = OTHER; note = two inverted abasic nucleosides
  modified_base 1: mod_base = um
  modified_base 1^2: mod_base = OTHER; note = Phosphorothioate bond
  modified_base 2: mod_base = um
  modified_base 2^3: mod_base = OTHER; note = Phosphorothioate bond
  modified_base 3: mod_base = um
  modified_base 4: mod_base = gm
  modified_base 5: mod_base = cm
  modified_base 6: mod_base = OTHER; note = 2'-O-methyl-adenosine
  modified_base 7: mod_base = um
  modified_base 8: mod_base = OTHER; note = 2'-O-methyl-adenosine
  modified_base 9: mod_base = OTHER; note = 2'-Fluoro-guanosine
  modified_base 10: mod_base = OTHER; note = 2'-Fluoro-cytidine
  modified_base 11: mod_base = OTHER; note = 2'-Fluoro-uridine
  modified_base 12: mod_base = gm
  modified_base 13: mod_base = um
  modified_base 14: mod_base = um
  modified_base 15: mod_base = um
  modified_base 16: mod_base = OTHER; note = 2'-O-methyl-adenosine
  modified_base 17: mod_base = OTHER; note = 2'-O-methyl-adenosine
  modified_base 18: mod_base = um
  modified_base 19: mod_base = gm
  modified_base 20: mod_base = um
  modified_base 21: mod_base = um
tttgcatagctgtttaatgtt

SEQ ID NO: 907 - RNA, 21 nt, synthetic construct
  source 1..21: mol_type = other RNA
  modified_base <1: mod_base = OTHER; note = two inverted abasic nucleosides
  modified_base 1: mod_base = cm
  modified_base 1^2: mod_base = OTHER; note = Phosphorothioate bond
  modified_base 2: mod_base = OTHER; note = 2'-O-methyl-adenosine
  modified_base 2^3: mod_base = OTHER; note = Phosphorothioate bond
  modified_base 3: mod_base = gm
  modified_base 4: mod_base = OTHER; note = 2'-O-methyl-adenosine
  modified_base 5: mod_base = um
  modified_base 6: mod_base = um
  modified_base 7: mod_base = gm
  modified_base 8: mod_base = um
  modified_base 9: mod_base = OTHER; note = 2'-Fluoro-cytidine
  modified_base 10: mod_base = OTHER; note = 2'-Fluoro-uridine
  modified_base 11: mod_base = OTHER; note = 2'-Fluoro-guanosine
  modified_base 12: mod_base = OTHER; note = 2'-O-methyl-adenosine
  modified_base 13: mod_base = um
  modified_base 14: mod_base = um
  modified_base 15: mod_base = um
  modified_base 16: mod_base = cm
  modified_base 17: mod_base = um
  modified_base 18: mod_base = gm
  modified_base 19: mod_base = OTHER; note = 2'-O-methyl-adenosine
  modified_base 20: mod_base = OTHER; note = 2'-O-methyl-adenosine
  modified_base 21: mod_base = um
cagattgtctgatttctgaat

SEQ ID NO: 908 - RNA, 21 nt, synthetic construct
  source 1..21: mol_type = other RNA
  modified_base <1: mod_base = OTHER; note = two inverted abasic nucleosides
  modified_base 1: mod_base = um
  modified_base 1^2: mod_base = OTHER; note = Phosphorothioate bond
  modified_base 2: mod_base = OTHER; note = 2'-O-methyl-adenosine
  modified_base 2^3: mod_base = OTHER; note = Phosphorothioate bond
  modified_base 3: mod_base = um
  modified_base 4: mod_base = gm
  modified_base 5: mod_base = OTHER; note = 2'-O-methyl-adenosine
  modified_base 6: mod_base = um
  modified_base 7: mod_base = cm
  modified_base 8: mod_base = um
  modified_base 9: mod_base = OTHER; note = 2'-Fluoro-adenosine
  modified_base 10: mod_base = OTHER; note = 2'-Fluoro-guanosine
  modified_base 11: mod_base = OTHER; note = 2'-Fluoro-cytidine
  modified_base 12: mod_base = um
  modified_base 13: mod_base = um
  modified_base 14: mod_base = gm
  modified_base 15: mod_base = OTHER; note = 2'-O-methyl-adenosine
  modified_base 16: mod_base = um
  modified_base 17: mod_base = um
  modified_base 18: mod_base = um
  modified_base 19: mod_base = um
  modified_base 20: mod_base = gm
  modified_base 21: mod_base = um
tatgatctagcttgattttgt

SEQ ID NO: 909 - RNA, 21 nt, synthetic construct
  source 1..21: mol_type = other RNA
  modified_base <1: mod_base = OTHER; note = two inverted abasic nucleosides
  modified_base 1: mod_base = gm
  modified_base 1^2: mod_base = OTHER; note = Phosphorothioate bond
  modified_base 2: mod_base = OTHER; note = 2'-O-methyl-adenosine
  modified_base 2^3: mod_base = OTHER; note = Phosphorothioate bond
  modified_base 3: mod_base = um
  modified_base 4: mod_base = cm
  modified_base 5: mod_base = cm
  modified_base 6: mod_base = OTHER; note = 2'-O-methyl-adenosine
  modified_base 7: mod_base = OTHER; note = 2'-O-methyl-adenosine
  modified_base 8: mod_base = OTHER; note = 2'-O-methyl-adenosine
  modified_base 9: mod_base = OTHER; note = 2'-Fluoro-uridine
  modified_base 10: mod_base = OTHER; note = 2'-Fluoro-uridine
  modified_base 11: mod_base = OTHER; note = 2'-Fluoro-uridine
  modified_base 12: mod_base = gm
  modified_base 13: mod_base = cm
  modified_base 14: mod_base = OTHER; note = 2'-O-methyl-adenosine
  modified_base 15: mod_base = um
  modified_base 16: mod_base = OTHER; note = 2'-O-methyl-adenosine
  modified_base 17: mod_base = gm
  modified_base 18: mod_base = cm
  modified_base 19: mod_base = um
  modified_base 20: mod_base = gm
  modified_base 21: mod_base = um
gatccaaatttgcatagctgt

SEQ ID NO: 910 - RNA, 21 nt, synthetic construct
  source 1..21: mol_type = other RNA
  modified_base <1: mod_base = OTHER; note = two inverted abasic nucleosides
  modified_base 1: mod_base = OTHER; note = 2'-O-methyl-adenosine
  modified_base 1^2: mod_base = OTHER; note = Phosphorothioate bond
  modified_base 2: mod_base = um
  modified_base 2^3: mod_base = OTHER; note = Phosphorothioate bond
  modified_base 3: mod_base = um
  modified_base 4: mod_base = gm
  modified_base 5: mod_base = um
  modified_base 6: mod_base = cm
  modified_base 7: mod_base = um
  modified_base 8: mod_base = gm
  modified_base 9: mod_base = OTHER; note = 2'-Fluoro-adenosine
  modified_base 10: mod_base = OTHER; note = 2'-Fluoro-uridine
  modified_base 11: mod_base = OTHER; note = 2'-Fluoro-uridine
  modified_base 12: mod_base = um
  modified_base 13: mod_base = cm
  modified_base 14: mod_base = um
  modified_base 15: mod_base = gm
  modified_base 16: mod_base = OTHER; note = 2'-O-methyl-adenosine
  modified_base 17: mod_base = OTHER; note = 2'-O-methyl-adenosine
  modified_base 18: mod_base = um
  modified_base 19: mod_base = gm
  modified_base 20: mod_base = um
  modified_base 21: mod_base = OTHER; note = 2'-O-methyl-adenosine
attgtctgatttctgaatgta

SEQ ID NO: 911 - RNA, 21 nt, synthetic construct
  source 1..21: mol_type = other RNA
  modified_base <1: mod_base = OTHER; note = two inverted abasic nucleosides
  modified_base 1: mod_base = um
  modified_base 1^2: mod_base = OTHER; note = Phosphorothioate bond
  modified_base 2: mod_base = gm
  modified_base 2^3: mod_base = OTHER; note = Phosphorothioate bond
  modified_base 3: mod_base = cm
  modified_base 4: mod_base = OTHER; note = 2'-O-methyl-adenosine
  modified_base 5: mod_base = um
  modified_base 6: mod_base = OTHER; note = 2'-O-methyl-adenosine
  modified_base 7: mod_base = gm
  modified_base 8: mod_base = cm
  modified_base 9: mod_base = OTHER; note = 2'-Fluoro-uridine
  modified_base 10: mod_base = OTHER; note = 2'-Fluoro-guanosine
  modified_base 11: mod_base = OTHER; note = 2'-Fluoro-uridine
  modified_base 12: mod_base = um
  modified_base 13: mod_base = um
  modified_base 14: mod_base = OTHER; note = 2'-O-methyl-adenosine
  modified_base 15: mod_base = OTHER; note = 2'-O-methyl-adenosine
  modified_base 16: mod_base = um
  modified_base 17: mod_base = gm
  modified_base 18: mod_base = um
  modified_base 19: mod_base = um
  modified_base 20: mod_base = OTHER; note = 2'-O-methyl-adenosine
  modified_base 21: mod_base = OTHER; note = 2'-O-methyl-adenosine
tgcatagctgtttaatgttaa

SEQ ID NO: 912 - RNA, 21 nt, synthetic construct
  source 1..21: mol_type = other RNA
  modified_base <1: mod_base = OTHER; note = two inverted abasic nucleosides
  modified_base 1: mod_base = um
  modified_base 1^2: mod_base = OTHER; note = Phosphorothioate bond
  modified_base 2: mod_base = OTHER; note = 2'-O-methyl-adenosine
  modified_base 2^3: mod_base = OTHER; note = Phosphorothioate bond
  modified_base 3: mod_base = OTHER; note = 2'-O-methyl-adenosine
  modified_base 4: mod_base = um
  modified_base 5: mod_base = um
  modified_base 6: mod_base = OTHER; note = 2'-O-methyl-adenosine
  modified_base 7: mod_base = um
  modified_base 8: mod_base = gm
  modified_base 9: mod_base = OTHER; note = 2'-Fluoro-adenosine
  modified_base 10: mod_base = OTHER; note = 2'-Fluoro-uridine
  modified_base 11: mod_base = OTHER; note = 2'-Fluoro-cytidine
  modified_base 12: mod_base = um
  modified_base 13: mod_base = OTHER; note = 2'-O-methyl-adenosine
  modified_base 14: mod_base = gm
  modified_base 15: mod_base = cm
  modified_base 16: mod_base = um
  modified_base 17: mod_base = um
  modified_base 18: mod_base = gm
  modified_base 19: mod_base = OTHER; note = 2'-O-methyl-adenosine
  modified_base 20: mod_base = um
  modified_base 21: mod_base = um
taattatgatctagcttgatt

SEQ ID NO: 913 - RNA, 21 nt, synthetic construct
  source 1..21: mol_type = other RNA
  modified_base <1: mod_base = OTHER; note = two inverted abasic nucleosides
  modified_base 1: mod_base = OTHER; note = 2'-O-methyl-adenosine
  modified_base 1^2: mod_base = OTHER; note = Phosphorothioate bond
  modified_base 2: mod_base = OTHER; note = 2'-O-methyl-adenosine
  modified_base 2^3: mod_base = OTHER; note = Phosphorothioate bond
  modified_base 3: mod_base = cm
  modified_base 4: mod_base = OTHER; note = 2'-O-methyl-adenosine
  modified_base 5: mod_base = gm
  modified_base 6: mod_base = cm
  modified_base 7: mod_base = OTHER; note = 2'-O-methyl-adenosine
  modified_base 8: mod_base = gm
  modified_base 9: mod_base = OTHER; note = 2'-Fluoro-uridine
  modified_base 10: mod_base = OTHER; note = 2'-Fluoro-cytidine
  modified_base 11: mod_base = OTHER; note = 2'-Fluoro-adenosine
  modified_base 12: mod_base = gm
  modified_base 13: mod_base = gm
  modified_base 14: mod_base = um
  modified_base 15: mod_base = um
  modified_base 16: mod_base = gm
  modified_base 17: mod_base = um
  modified_base 18: mod_base = um
  modified_base 19: mod_base = um
  modified_base 20: mod_base = OTHER; note = 2'-O-methyl-adenosine
  modified_base 21: mod_base = cm
aacagcagtcaggttgtttac

SEQ ID NO: 914 - RNA, 21 nt, synthetic construct
  source 1..21: mol_type = other RNA
  modified_base <1: mod_base = OTHER; note = two inverted abasic nucleosides
  modified_base 1: mod_base = cm
  modified_base 1^2: mod_base = OTHER; note = Phosphorothioate bond
  modified_base 2: mod_base = cm
  modified_base 2^3: mod_base = OTHER; note = Phosphorothioate bond
  modified_base 3: mod_base = OTHER; note = 2'-O-methyl-adenosine
  modified_base 4: mod_base = gm
  modified_base 5: mod_base = OTHER; note = 2'-O-methyl-adenosine
  modified_base 6: mod_base = um
  modified_base 7: mod_base = um
  modified_base 8: mod_base = gm
  modified_base 9: mod_base = OTHER; note = 2'-Fluoro-uridine
  modified_base 10: mod_base = OTHER; note = 2'-Fluoro-cytidine
  modified_base 11: mod_base = OTHER; note = 2'-Fluoro-uridine
  modified_base 12: mod_base = gm
  modified_base 13: mod_base = OTHER; note = 2'-O-methyl-adenosine
  modified_base 14: mod_base = um
  modified_base 15: mod_base = um
  modified_base 16: mod_base = um
  modified_base 17: mod_base = cm
  modified_base 18: mod_base = um
  modified_base 19: mod_base = gm
  modified_base 20: mod_base = OTHER; note = 2'-O-methyl-adenosine
  modified_base 21: mod_base = OTHER; note = 2'-O-methyl-adenosine
ccagattgtctgatttctgaa

SEQ ID NO: 915 - RNA, 21 nt, synthetic construct
  source 1..21: mol_type = other RNA
  modified_base <1: mod_base = OTHER; note = two inverted abasic nucleosides
  modified_base 1: mod_base = cm
  modified_base 1^2: mod_base = OTHER; note = Phosphorothioate bond
  modified_base 2: mod_base = OTHER; note = 2'-O-methyl-adenosine
  modified_base 2^3: mod_base = OTHER; note = Phosphorothioate bond
  modified_base 3: mod_base = um
  modified_base 4: mod_base = OTHER; note = 2'-O-methyl-adenosine
  modified_base 5: mod_base = gm
  modified_base 6: mod_base = cm
  modified_base 7: mod_base = um
  modified_base 8: mod_base = gm
  modified_base 9: mod_base = OTHER; note = 2'-Fluoro-uridine
  modified_base 10: mod_base = OTHER; note = 2'-Fluoro-uridine
  modified_base 11: mod_base = OTHER; note = 2'-Fluoro-uridine
  modified_base 12: mod_base = OTHER; note = 2'-O-methyl-adenosine
  modified_base 13: mod_base = OTHER; note = 2'-O-methyl-adenosine
  modified_base 14: mod_base = um
  modified_base 15: mod_base = gm
  modified_base 16: mod_base = um
  modified_base 17: mod_base = um
  modified_base 18: mod_base = OTHER; note = 2'-O-methyl-adenosine
  modified_base 19: mod_base = OTHER; note = 2'-O-methyl-adenosine
  modified_base 20: mod_base = gm
  modified_base 21: mod_base = um
catagctgtttaatgttaagt

SEQ ID NO: 916 - RNA, 21 nt, synthetic construct
  source 1..21: mol_type = other RNA
  modified_base <1: mod_base = OTHER; note = two inverted abasic nucleosides
  modified_base 1: mod_base = OTHER; note = 2'-O-methyl-adenosine
  modified_base 1^2: mod_base = OTHER; note = Phosphorothioate bond
  modified_base 2: mod_base = OTHER; note = 2'-O-methyl-adenosine
  modified_base 2^3: mod_base = OTHER; note = Phosphorothioate bond
  modified_base 3: mod_base = um
  modified_base 4: mod_base = um
  modified_base 5: mod_base = OTHER; note = 2'-O-methyl-adenosine
  modified_base 6: mod_base = um
  modified_base 7: mod_base = gm
  modified_base 8: mod_base = OTHER; note = 2'-O-methyl-adenosine
  modified_base 9: mod_base = OTHER; note = 2'-Fluoro-uridine
  modified_base 10: mod_base = OTHER; note = 2'-Fluoro-cytidine
  modified_base 11: mod_base = OTHER; note = 2'-Fluoro-uridine
  modified_base 12: mod_base = OTHER; note = 2'-O-methyl-adenosine
  modified_base 13: mod_base = gm
  modified_base 14: mod_base = cm
  modified_base 15: mod_base = um
  modified_base 16: mod_base = um
  modified_base 17: mod_base = gm
  modified_base 18: mod_base = OTHER; note = 2'-O-methyl-adenosine
  modified_base 19: mod_base = um
  modified_base 20: mod_base = um
  modified_base 21: mod_base = um
aattatgatctagcttgattt

SEQ ID NO: 917 - RNA, 21 nt, synthetic construct
  source 1..21: mol_type = other RNA
  modified_base <1: mod_base = OTHER; note = two inverted abasic nucleosides
  modified_base 1: mod_base = um
  modified_base 1^2: mod_base = OTHER; note = Phosphorothioate bond
  modified_base 2: mod_base = OTHER; note = 2'-O-methyl-adenosine
  modified_base 2^3: mod_base = OTHER; note = Phosphorothioate bond
  modified_base 3: mod_base = cm
  modified_base 4: mod_base = cm
  modified_base 5: mod_base = um
  modified_base 6: mod_base = um
  modified_base 7: mod_base = OTHER; note = 2'-O-methyl-adenosine
  modified_base 8: mod_base = um
  modified_base 9: mod_base = OTHER; note = 2'-Fluoro-guanosine
  modified_base 10: mod_base = OTHER; note = 2'-Fluoro-uridine
  modified_base 11: mod_base = OTHER; note = 2'-Fluoro-uridine
  modified_base 12: mod_base = cm
  modified_base 13: mod_base = OTHER; note = 2'-O-methyl-adenosine
  modified_base 14: mod_base = gm
  modified_base 15: mod_base = um
  modified_base 16: mod_base = OTHER; note = 2'-O-methyl-adenosine
  modified_base 17: mod_base = um
  modified_base 18: mod_base = um
  modified_base 19: mod_base = um
  modified_base 20: mod_base = um
  modified_base 21: mod_base = gm
taccttatgttcagtattttg

SEQ ID NO: 918 - RNA, 21 nt, synthetic construct
  source 1..21: mol_type = other RNA
  modified_base <1: mod_base = OTHER; note = two inverted abasic nucleosides
  modified_base 1: mod_base = um
  modified_base 1^2: mod_base = OTHER; note = Phosphorothioate bond
  modified_base 2: mod_base = OTHER; note = 2'-O-methyl-adenosine
  modified_base 2^3: mod_base = OTHER; note = Phosphorothioate bond
  modified_base 3: mod_base = um
  modified_base 4: mod_base = um
  modified_base 5: mod_base = um
  modified_base 6: mod_base = um
  modified_base 7: mod_base = gm
  modified_base 8: mod_base = gm
  modified_base 9: mod_base = OTHER; note = 2'-Fluoro-adenosine
  modified_base 10: mod_base = OTHER; note = 2'-Fluoro-guanosine
  modified_base 11: mod_base = OTHER; note = 2'-Fluoro-guanosine
  modified_base 12: mod_base = um
  modified_base 13: mod_base = gm
  modified_base 14: mod_base = um
  modified_base 15: mod_base = cm
  modified_base 16: mod_base = um
  modified_base 17: mod_base = cm
  modified_base 18: mod_base = um
  modified_base 19: mod_base = gm
  modified_base 20: mod_base = cm
  modified_base 21: mod_base = um
tattttggaggtgtctctgct

SEQ ID NO: 919 - RNA, 21 nt, synthetic construct
  source 1..21: mol_type = other RNA
  modified_base <1: mod_base = OTHER; note = two inverted abasic nucleosides
  modified_base 1: mod_base = gm
  modified_base 1^2: mod_base = OTHER; note = Phosphorothioate bond
  modified_base 2: mod_base = OTHER; note = 2'-O-methyl-adenosine
  modified_base 2^3: mod_base = OTHER; note = Phosphorothioate bond
  modified_base 3: mod_base = cm
  modified_base 4: mod_base = um
  modified_base 5: mod_base = um
  modified_base 6: mod_base = um
  modified_base 7: mod_base = um
  modified_base 8: mod_base = cm
  modified_base 9: mod_base = OTHER; note = 2'-Fluoro-cytidine
  modified_base 10: mod_base = OTHER; note = 2'-Fluoro-adenosine
  modified_base 11: mod_base = OTHER; note = 2'-Fluoro-adenosine
  modified_base 12: mod_base = OTHER; note = 2'-O-methyl-adenosine
  modified_base 13: mod_base = gm
  modified_base 14: mod_base = um
  modified_base 15: mod_base = gm
  modified_base 16: mod_base = cm
  modified_base 17: mod_base = cm
  modified_base 18: mod_base = um
  modified_base 19: mod_base = um
  modified_base 20: mod_base = OTHER; note = 2'-O-methyl-adenosine
  modified_base 21: mod_base = OTHER; note = 2'-O-methyl-adenosine
gacttttccaaagtgccttaa

SEQ ID NO: 920 - RNA, 21 nt, synthetic construct
  source 1..21: mol_type = other RNA
  modified_base <1: mod_base = OTHER; note = two inverted abasic nucleosides
  modified_base 1: mod_base = OTHER; note = 2'-O-methyl-adenosine
  modified_base 1^2: mod_base = OTHER; note = Phosphorothioate bond
  modified_base 2: mod_base = gm
  modified_base 2^3: mod_base = OTHER; note = Phosphorothioate bond
  modified_base 3: mod_base = um
  modified_base 4: mod_base = OTHER; note = 2'-O-methyl-adenosine
  modified_base 5: mod_base = um
  modified_base 6: mod_base = um
  modified_base 7: mod_base = um
  modified_base 8: mod_base = um
  modified_base 9: mod_base = OTHER; note = 2'-Fluoro-guanosine
  modified_base 10: mod_base = OTHER; note = 2'-Fluoro-guanosine
  modified_base 11: mod_base = OTHER; note = 2'-Fluoro-adenosine
  modified_base 12: mod_base = gm
  modified_base 13: mod_base = gm
  modified_base 14: mod_base = um
  modified_base 15: mod_base = gm
  modified_base 16: mod_base = um
  modified_base 17: mod_base = cm
  modified_base 18: mod_base = um
  modified_base 19: mod_base = cm
  modified_base 20: mod_base = um
  modified_base 21: mod_base = gm
agtattttggaggtgtctctg

SEQ ID NO: 921 - RNA, 21 nt, synthetic construct
  source 1..21: mol_type = other RNA
  modified_base <1: mod_base = OTHER; note = two inverted abasic nucleosides
  modified_base 1: mod_base = OTHER; note = 2'-O-methyl-adenosine
  modified_base 1^2: mod_base = OTHER; note = Phosphorothioate bond
  modified_base 2: mod_base = cm
  modified_base 2^3: mod_base = OTHER; note = Phosphorothioate bond
  modified_base 3: mod_base = um
  modified_base 4: mod_base = um
  modified_base 5: mod_base = um
  modified_base 6: mod_base = um
  modified_base 7: mod_base = cm
  modified_base 8: mod_base = cm
  modified_base 9: mod_base = OTHER; note = 2'-Fluoro-adenosine
  modified_base 10: mod_base = OTHER; note = 2'-Fluoro-adenosine
  modified_base 11: mod_base = OTHER; note = 2'-Fluoro-adenosine
  modified_base 12: mod_base = gm
  modified_base 13: mod_base = um
  modified_base 14: mod_base = gm
  modified_base 15: mod_base = cm
  modified_base 16: mod_base = cm
  modified_base 17: mod_base = um
  modified_base 18: mod_base = um
  modified_base 19: mod_base = OTHER; note = 2'-O-methyl-adenosine
  modified_base 20: mod_base = OTHER; note = 2'-O-methyl-adenosine
  modified_base 21: mod_base = OTHER; note = 2'-O-methyl-adenosine
acttttccaaagtgccttaaa

SEQ ID NO: 922 - RNA, 21 nt, synthetic construct
  source 1..21: mol_type = other RNA
  modified_base <1: mod_base = OTHER; note = two inverted abasic nucleosides
  modified_base 1: mod_base = gm
  modified_base 1^2: mod_base = OTHER; note = Phosphorothioate bond
  modified_base 2: mod_base = um
  modified_base 2^3: mod_base = OTHER; note = Phosphorothioate bond
  modified_base 3: mod_base = OTHER; note = 2'-O-methyl-adenosine
  modified_base 4: mod_base = um
  modified_base 5: mod_base = um
  modified_base 6: mod_base = um
  modified_base 7: mod_base = um
  modified_base 8: mod_base = gm
  modified_base 9: mod_base = OTHER; note = 2'-Fluoro-guanosine
  modified_base 10: mod_base = OTHER; note = 2'-Fluoro-adenosine
  modified_base 11: mod_base = OTHER; note = 2'-Fluoro-guanosine
  modified_base 12: mod_base = gm
  modified_base 13: mod_base = um
  modified_base 14: mod_base = gm
  modified_base 15: mod_base = um
  modified_base 16: mod_base = cm
  modified_base 17: mod_base = um
  modified_base 18: mod_base = cm
  modified_base 19: mod_base = um
  modified_base 20: mod_base = gm
  modified_base 21: mod_base = cm
gtattttggaggtgtctctgc

SEQ ID NO: 923 - RNA, 21 nt, synthetic construct
  source 1..21: mol_type = other RNA
  modified_base <1: mod_base = OTHER; note = two inverted abasic nucleosides
  modified_base 1: mod_base = OTHER; note = 2'-O-methyl-adenosine
  modified_base 1^2: mod_base = OTHER; note = Phosphorothioate bond
  modified_base 2: mod_base = OTHER; note = 2'-O-methyl-adenosine
  modified_base 2^3: mod_base = OTHER; note = Phosphorothioate bond
  modified_base 3: mod_base = OTHER; note = 2'-O-methyl-adenosine
  modified_base 4: mod_base = um
  modified_base 5: mod_base = cm
  modified_base 6: mod_base = OTHER; note = 2'-O-methyl-adenosine
  modified_base 7: mod_base = cm
  modified_base 8: mod_base = OTHER; note = 2'-O-methyl-adenosine
  modified_base 9: mod_base = OTHER; note = 2'-Fluoro-guanosine
  modified_base 10: mod_base = OTHER; note = 2'-Fluoro-uridine
  modified_base 11: mod_base = OTHER; note = 2'-Fluoro-guanosine
  modified_base 12: mod_base = gm
  modified_base 13: mod_base = OTHER; note = 2'-O-methyl-adenosine
  modified_base 14: mod_base = cm
  modified_base 15: mod_base = OTHER; note = 2'-O-methyl-adenosine
  modified_base 16: mod_base = um
  modified_base 17: mod_base = cm
  modified_base 18: mod_base = gm
  modified_base 19: mod_base = gm
  modified_base 20: mod_base = gm
  modified_base 21: mod_base = OTHER; note = 2'-O-methyl-adenosine
aaatcacagtggacatcggga

SEQ ID NO: 924 - RNA, 21 nt, synthetic construct
  source 1..21: mol_type = other RNA
  modified_base <1: mod_base = OTHER; note = two inverted abasic nucleosides
  modified_base 1: mod_base = OTHER; note = 2'-O-methyl-adenosine
  modified_base 1^2: mod_base = OTHER; note = Phosphorothioate bond
  modified_base 2: mod_base = um
  modified_base 2^3: mod_base = OTHER; note = Phosphorothioate bond
  modified_base 3: mod_base = cm
  modified_base 4: mod_base = OTHER; note = 2'-O-methyl-adenosine
  modified_base 5: mod_base = cm
  modified_base 6: mod_base = OTHER; note = 2'-O-methyl-adenosine
  modified_base 7: mod_base = gm
  modified_base 8: mod_base = um
  modified_base 9: mod_base = OTHER; note = 2'-Fluoro-guanosine
  modified_base 10: mod_base = OTHER; note = 2'-Fluoro-guanosine
  modified_base 11: mod_base = OTHER; note = 2'-Fluoro-adenosine
  modified_base 12: mod_base = cm
  modified_base 13: mod_base = OTHER; note = 2'-O-methyl-adenosine
  modified_base 14: mod_base = um
  modified_base 15: mod_base = cm
  modified_base 16: mod_base = gm
  modified_base 17: mod_base = gm
  modified_base 18: mod_base = gm
  modified_base 19: mod_base = OTHER; note = 2'-O-methyl-adenosine
  modified_base 20: mod_base = cm
  modified_base 21: mod_base = OTHER; note = 2'-O-methyl-adenosine
atcacagtggacatcgggaca

SEQ ID NO: 925 - RNA, 21 nt, synthetic construct
  source 1..21: mol_type = other RNA
  modified_base <1: mod_base = OTHER; note = two inverted abasic nucleosides
  modified_base 1: mod_base = cm
  modified_base 1^2: mod_base = OTHER; note = Phosphorothioate bond
  modified_base 2: mod_base = cm
  modified_base 2^3: mod_base = OTHER; note = Phosphorothioate bond
  modified_base 3: mod_base = cm
  modified_base 4: mod_base = um
  modified_base 5: mod_base = gm
  modified_base 6: mod_base = OTHER; note = 2'-O-methyl-adenosine
  modified_base 7: mod_base = gm
  modified_base 8: mod_base = gm
  modified_base 9: mod_base = OTHER; note = 2'-Fluoro-adenosine
  modified_base 10: mod_base = OTHER; note = 2'-Fluoro-guanosine
  modified_base 11: mod_base = OTHER; note = 2'-Fluoro-uridine
  modified_base 12: mod_base = cm
  modified_base 13: mod_base = cm
  modified_base 14: mod_base = cm
  modified_base 15: mod_base = cm
  modified_base 16: mod_base = gm
  modified_base 17: mod_base = cm
  modified_base 18: mod_base = um
  modified_base 19: mod_base = gm
  modified_base 20: mod_base = cm
  modified_base 21: mod_base = um
ccctgaggagtccccgctgct

SEQ ID NO: 926 - RNA, 21 nt, synthetic construct
  source 1..21: mol_type = other RNA
  modified_base <1: mod_base = OTHER; note = two inverted abasic nucleosides
  modified_base 1: mod_base = gm
  modified_base 1^2: mod_base = OTHER; note = Phosphorothioate bond
  modified_base 2: mod_base = cm
  modified_base 2^3: mod_base = OTHER; note = Phosphorothioate bond
  modified_base 3: mod_base = gm
  modified_base 4: mod_base = gm
  modified_base 5: mod_base = gm
  modified_base 6: mod_base = cm
  modified_base 7: mod_base = cm
  modified_base 8: mod_base = um
  modified_base 9: mod_base = OTHER; note = 2'-Fluoro-guanosine
  modified_base 10: mod_base = OTHER; note = 2'-Fluoro-cytidine
  modified_base 11: mod_base = OTHER; note = 2'-Fluoro-cytidine
  modified_base 12: mod_base = gm
  modified_base 13: mod_base = cm
  modified_base 14: mod_base = cm
  modified_base 15: mod_base = um
  modified_base 16: mod_base = gm
  modified_base 17: mod_base = cm
  modified_base 18: mod_base = um
  modified_base 19: mod_base = cm
  modified_base 20: mod_base = gm
  modified_base 21: mod_base = um
gcgggcctgccgcctgctcgt

SEQ ID NO: 927 - RNA, 21 nt, synthetic construct
  source 1..21: mol_type = other RNA
  modified_base <1: mod_base = OTHER; note = two inverted abasic nucleosides
  modified_base 1: mod_base = cm
  modified_base 1^2: mod_base = OTHER; note = Phosphorothioate bond
  modified_base 2: mod_base = cm
  modified_base 2^3: mod_base = OTHER; note = Phosphorothioate bond
  modified_base 3: mod_base = cm
  modified_base 4: mod_base = OTHER; note = 2'-O-methyl-adenosine
  modified_base 5: mod_base = OTHER; note = 2'-O-methyl-adenosine
  modified_base 6: mod_base = OTHER; note = 2'-O-methyl-adenosine
  modified_base 7: mod_base = um
  modified_base 8: mod_base = cm
  modified_base 9: mod_base = OTHER; note = 2'-Fluoro-adenosine
  modified_base 10: mod_base = OTHER; note = 2'-Fluoro-cytidine
  modified_base 11: mod_base = OTHER; note = 2'-Fluoro-adenosine
  modified_base 12: mod_base = gm
  modified_base 13: mod_base = um
  modified_base 14: mod_base = gm
  modified_base 15: mod_base = gm
  modified_base 16: mod_base = OTHER; note = 2'-O-methyl-adenosine
  modified_base 17: mod_base = cm
  modified_base 18: mod_base = OTHER; note = 2'-O-methyl-adenosine
  modified_base 19: mod_base = um
  modified_base 20: mod_base = cm
  modified_base 21: mod_base = gm
cccaaatcacagtggacatcg

SEQ ID NO: 928 - RNA, 21 nt, synthetic construct
  source 1..21: mol_type = other RNA
  modified_base <1: mod_base = OTHER; note = two inverted abasic nucleosides
  modified_base 1: mod_base = cm
  modified_base 1^2: mod_base = OTHER; note = Phosphorothioate bond
  modified_base 2: mod_base = OTHER; note = 2'-O-methyl-adenosine
  modified_base 2^3: mod_base = OTHER; note = Phosphorothioate bond
  modified_base 3: mod_base = OTHER; note = 2'-O-methyl-adenosine
  modified_base 4: mod_base = OTHER; note = 2'-O-methyl-adenosine
  modified_base 5: mod_base = um
  modified_base 6: mod_base = cm
  modified_base 7: mod_base = OTHER; note = 2'-O-methyl-adenosine
  modified_base 8: mod_base = cm
  modified_base 9: mod_base = OTHER; note = 2'-Fluoro-adenosine
  modified_base 10: mod_base = OTHER; note = 2'-Fluoro-guanosine
  modified_base 11: mod_base = OTHER; note = 2'-Fluoro-uridine
  modified_base 12: mod_base = gm
  modified_base 13: mod_base = gm
  modified_base 14: mod_base = OTHER; note = 2'-O-methyl-adenosine
  modified_base 15: mod_base = cm
  modified_base 16: mod_base = OTHER; note = 2'-O-methyl-adenosine
  modified_base 17: mod_base = um
  modified_base 18: mod_base = cm
  modified_base 19: mod_base = gm
  modified_base 20: mod_base = gm
  modified_base 21: mod_base = gm
caaatcacagtggacatcggg

SEQ ID NO: 929 - RNA, 21 nt, synthetic construct
  source 1..21: mol_type = other RNA
  modified_base <1: mod_base = OTHER; note = two inverted abasic nucleosides
  modified_base 1: mod_base = cm
  modified_base 1^2: mod_base = OTHER; note = Phosphorothioate bond
  modified_base 2: mod_base = OTHER; note = 2'-O-methyl-adenosine
  modified_base 2^3: mod_base = OTHER; note = Phosphorothioate bond
  modified_base 3: mod_base = gm
  modified_base 4: mod_base = um
  modified_base 5: mod_base = gm
  modified_base 6: mod_base = gm
  modified_base 7: mod_base = OTHER; note = 2'-O-methyl-adenosine
  modified_base 8: mod_base = cm
  modified_base 9: mod_base = OTHER; note = 2'-Fluoro-adenosine
  modified_base 10: mod_base = OTHER; note = 2'-Fluoro-uridine
  modified_base 11: mod_base = OTHER; note = 2'-Fluoro-cytidine
  modified_base 12: mod_base = gm
  modified_base 13: mod_base = gm
  modified_base 14: mod_base = gm
  modified_base 15: mod_base = OTHER; note = 2'-O-methyl-adenosine
  modified_base 16: mod_base = cm
  modified_base 17: mod_base = OTHER; note = 2'-O-methyl-adenosine
  modified_base 18: mod_base = cm
  modified_base 19: mod_base = cm
  modified_base 20: mod_base = gm
  modified_base 21: mod_base = OTHER; note = 2'-O-methyl-adenosine
cagtggacatcgggacaccga

SEQ ID NO: 930 - RNA, 21 nt, synthetic construct
  source 1..21: mol_type = other RNA
  modified_base <1: mod_base = OTHER; note = two inverted abasic nucleosides
  modified_base 1: mod_base = cm
  modified_base 1^2: mod_base = OTHER; note = Phosphorothioate bond
  modified_base 2: mod_base = OTHER; note = 2'-O-methyl-adenosine
  modified_base 2^3: mod_base = OTHER; note = Phosphorothioate bond
  modified_base 3: mod_base = OTHER; note = 2'-O-methyl-adenosine
  modified_base 4: mod_base = um
  modified_base 5: mod_base = cm
  modified_base 6: mod_base = cm
  modified_base 7: mod_base = um
  modified_base 8: mod_base = cm
  modified_base 9: mod_base = OTHER; note = 2'-Fluoro-adenosine
  modified_base 10: mod_base = OTHER; note = 2'-Fluoro-guanosine
  modified_base 11: mod_base = OTHER; note = 2'-Fluoro-adenosine
  modified_base 12: mod_base = gm
  modified_base 13: mod_base = gm
  modified_base 14: mod_base = um
  modified_base 15: mod_base = um
  modified_base 16: mod_base = um
  modified_base 17: mod_base = gm
  modified_base 18: mod_base = OTHER; note = 2'-O-methyl-adenosine
  modified_base 19: mod_base = cm
  modified_base 20: mod_base = cm
  modified_base 21: mod_base = gm
caatcctcagaggtttgaccg

SEQ ID NO: 931 - RNA, 21 nt, synthetic construct
  source 1..21: mol_type = other RNA
  modified_base <1: mod_base = OTHER; note = two inverted abasic nucleosides
  modified_base 1: mod_base = gm
  modified_base 1^2: mod_base = OTHER; note = Phosphorothioate bond
  modified_base 2: mod_base = gm
  modified_base 2^3: mod_base = OTHER; note = Phosphorothioate bond
  modified_base 3: mod_base = gm
  modified_base 4: mod_base = cm
  modified_base 5: mod_base = cm
  modified_base 6: mod_base = um
  modified_base 7: mod_base = gm
  modified_base 8: mod_base = cm
  modified_base 9: mod_base = OTHER; note = 2'-Fluoro-cytidine
  modified_base 10: mod_base = OTHER; note = 2'-Fluoro-guanosine
  modified_base 11: mod_base = OTHER; note = 2'-Fluoro-cytidine
  modified_base 12: mod_base = cm
  modified_base 13: mod_base = um
  modified_base 14: mod_base = gm
  modified_base 15: mod_base = cm
  modified_base 16: mod_base = um
  modified_base 17: mod_base = cm
  modified_base 18: mod_base = gm
  modified_base 19: mod_base = um
  modified_base 20: mod_base = gm
  modified_base 21: mod_base = gm
gggcctgccgcctgctcgtgg

SEQ ID NO: 932 - RNA, 21 nt, synthetic construct
  source 1..21: mol_type = other RNA
  modified_base <1: mod_base = OTHER; note = two inverted abasic nucleosides
  modified_base 1: mod_base = cm
  modified_base 1^2: mod_base = OTHER; note = Phosphorothioate bond
  modified_base 2: mod_base = gm
  modified_base 2^3: mod_base = OTHER; note = Phosphorothioate bond
  modified_base 3: mod_base = gm
  modified_base 4: mod_base = gm
  modified_base 5: mod_base = cm
  modified_base 6: mod_base = cm
  modified_base 7: mod_base = um
  modified_base 8: mod_base = gm
  modified_base 9: mod_base = OTHER; note = 2'-Fluoro-cytidine
  modified_base 10: mod_base = OTHER; note = 2'-Fluoro-cytidine
  modified_base 11: mod_base = OTHER; note = 2'-Fluoro-guanosine
  modified_base 12: mod_base = cm
  modified_base 13: mod_base = cm
  modified_base 14: mod_base = um
  modified_base 15: mod_base = gm
  modified_base 16: mod_base = cm
  modified_base 17: mod_base = um
  modified_base 18: mod_base = cm
  modified_base 19: mod_base = gm
  modified_base 20: mod_base = um
  modified_base 21: mod_base = gm
cgggcctgccgcctgctcgtg

SEQ ID NO: 933 - DNA, 21 bp, synthetic construct
  misc_feature 1..21: note = Description of sequence: Description: B4GALT1 siRNA antisense strands (unmodified)
  source 1..21: mol_type = other DNA
  modified_base 4: mod_base = OTHER; note = uracil
  modified_base 11: mod_base = OTHER; note = uracil
  modified_base 12: mod_base = OTHER; note = uracil
acgtgacacgttcggagaatt

SEQ ID NO: 934 - DNA, 21 bp, synthetic construct
  misc_feature 1..21: note = Description of sequence: Description: B4GALT1 siRNA sense strands (unmodified)
  source 1..21: mol_type = other DNA
  modified_base 1: mod_base = OTHER; note = uracil
  modified_base 2: mod_base = OTHER; note = uracil
  modified_base 4: mod_base = OTHER; note = uracil
  modified_base 12: mod_base = OTHER; note = uracil
  modified_base 14: mod_base = OTHER; note = uracil
  modified_base 19: mod_base = OTHER; note = uracil
ttctccgaacgtgtcacgttt